United States Patent Application Publication US 2026/0259220 A1, published September 3, 2026 (application 19/449,150).

The application's sequence listing, which the Patent Office published only in electronic form, follows.

SEQUENCE LISTING (333 sequences)

SEQ ID NO: 1 - protein, 1273 aa, Severe acute respiratory syndrome-related coronavirus
MFVFLVLLPLVSSQCVNLTTRTQLPPAYTNSFTRGVYYPDKVFRSSVLHSTQDLFLPFFSNVTWFHAIHVSGTNGTKRFDNPVLPFNDGVYFASTEKSNIIRGWIFGTTLDSKTQSLLIVNNATNVVIKVCEFQFCNDPFLGVYYHKNNKSWMESEFRVYSSANNCTFEYVSQPFLMDLEGKQGNFKNLREFVFKNIDGYFKIYSKHTPINLVRDLPQGFSALEPLVDLPIGINITRFQTLLALHRSYLTPGDSSSGWTAGAAAYYVGYLQPRTFLLKYNENGTITDAVDCALDPLSETKCTLKSFTVEKGIYQTSNFRVQPTESIVRFPNITNLCPFGEVFNATRFASVYAWNRKRISNCVADYSVLYNSASFSTFKCYGVSPTKLNDLCFTNVYADSFVIRGDEVRQIAPGQTGKIADYNYKLPDDFTGCVIAWNSNNLDSKVGGNYNYLYRLFRKSNLKPFERDISTEIYQAGSTPCNGVEGFNCYFPLQSYGFQPTNGVGYQPYRVVVLSFELLHAPATVCGPKKSTNLVKNKCVNFNFNGLTGTGVLTESNKKFLPFQQFGRDIADTTDAVRDPQTLEILDITPCSFGGVSVITPGTNTSNQVAVLYQDVNCTEVPVAIHADQLTPTWRVYSTGSNVFQTRAGCLIGAEHVNNSYECDIPIGAGICASYQTQTNSPRRARSVASQSIIAYTMSLGAENSVAYSNNSIAIPTNFTISVTTEILPVSMTKTSVDCTMYICGDSTECSNLLLQYGSFCTQLNRALTGIAVEQDKNTQEVFAQVKQIYKTPPIKDFGGFNFSQILPDPSKPSKRSFIEDLLFNKVTLADAGFIKQYGDCLGDIAARDLICAQKFNGLTVLPPLLTDEMIAQYTSALLAGTITSGWTFGAGAALQIPFAMQMAYRFNGIGVTQNVLYENQKLIANQFNSAIGKIQDSLSSTASALGKLQDVVNQNAQALNTLVKQLSSNFGAISSVLNDILSRLDKVEAEVQIDRLITGRLQSLQTYVTQQLIRAAEIRASANLAATKMSECVLGQSKRVDFCGKGYHLMSFPQSAPHGVVFLHVTYVPAQEKNFTTAPAICHDGKAHFPREGVFVSNGTHWFVTQRNFYEPQIITTDNTFVSGNCDVVIGIVNNTVYDPLQPELDSFKEELDKYFKNHTSPDVDLGDISGINASVVNIQKEIDRLNEVAKNLNESLIDLQELGKYEQYIKWPWYIWLGFIAGLIAIVMVTIMLCCMTSCCSCLKGCCSCGSCCKFDEDDSEPVLKGVKLHYT

SEQ ID NO: 2 - protein, 1260 aa, Severe acute respiratory syndrome-related coronavirus
QCVNLTTRTQLPPAYTNSFTRGVYYPDKVFRSSVLHSTQDLFLPFFSNVTWFHAIHVSGTNGTKRFDNPVLPFNDGVYFASTEKSNIIRGWIFGTTLDSKTQSLLIVNNATNVVIKVCEFQFCNDPFLGVYYHKNNKSWMESEFRVYSSANNCTFEYVSQPFLMDLEGKQGNFKNLREFVFKNIDGYFKIYSKHTPINLVRDLPQGFSALEPLVDLPIGINITRFQTLLALHRSYLTPGDSSSGWTAGAAAYYVGYLQPRTFLLKYNENGTITDAVDCALDPLSETKCTLKSFTVEKGIYQTSNFRVQPTESIVRFPNITNLCPFGEVFNATRFASVYAWNRKRISNCVADYSVLYNSASFSTFKCYGVSPTKLNDLCFTNVYADSFVIRGDEVRQIAPGQTGKIADYNYKLPDDFTGCVIAWNSNNLDSKVGGNYNYLYRLFRKSNLKPFERDISTEIYQAGSTPCNGVEGFNCYFPLQSYGFQPTNGVGYQPYRVVVLSFELLHAPATVCGPKKSTNLVKNKCVNFNFNGLTGTGVLTESNKKFLPFQQFGRDIADTTDAVRDPQTLEILDITPCSFGGVSVITPGTNTSNQVAVLYQDVNCTEVPVAIHADQLTPTWRVYSTGSNVFQTRAGCLIGAEHVNNSYECDIPIGAGICASYQTQTNSPRRARSVASQSIIAYTMSLGAENSVAYSNNSIAIPTNFTISVTTEILPVSMTKTSVDCTMYICGDSTECSNLLLQYGSFCTQLNRALTGIAVEQDKNTQEVFAQVKQIYKTPPIKDFGGFNFSQILPDPSKPSKRSFIEDLLFNKVTLADAGFIKQYGDCLGDIAARDLICAQKFNGLTVLPPLLTDEMIAQYTSALLAGTITSGWTFGAGAALQIPFAMQMAYRFNGIGVTQNVLYENQKLIANQFNSAIGKIQDSLSSTASALGKLQDVVNQNAQALNTLVKQLSSNFGAISSVLNDILSRLDKVEAEVQIDRLITGRLQSLQTYVTQQLIRAAEIRASANLAATKMSECVLGQSKRVDFCGKGYHLMSFPQSAPHGVVFLHVTYVPAQEKNFTTAPAICHDGKAHFPREGVFVSNGTHWFVTQRNFYEPQIITTDNTFVSGNCDVVIGIVNNTVYDPLQPELDSFKEELDKYFKNHTSPDVDLGDISGINASVVNIQKEIDRLNEVAKNLNESLIDLQELGKYEQYIKWPWYIWLGFIAGLIAIVMVTIMLCCMTSCCSCLKGCCSCGSCCKFDEDDSEPVLKGVKLHYT

SEQ ID NO: 3 - protein, 1273 aa, synthetic construct
  REGION 1..1273: note = RECOMBINANT S PROTEIN
MFVFLVLLPLVSSQCVNLTTRTQLPPAYTNSFTRGVYYPDKVFRSSVLHSTQDLFLPFFSNVTWFHAIHVSGTNGTKRFDNPVLPFNDGVYFASTEKSNIIRGWIFGTTLDSKTQSLLIVNNATNVVIKVCEFQFCNDPFLGVYYHKNNKSWMESEFRVYSSANNCTFEYVSQPFLMDLEGKQGNFKNLREFVFKNIDGYFKIYSKHTPINLVRDLPQGFSALEPLVDLPIGINITRFQTLLALHRSYLTPGDSSSGWTAGAAAYYVGYLQPRTFLLKYNENGTITDAVDCALDPLSETKCTLKSFTVEKGIYQTSNFRVQPTESIVRFPNITNLCPFGEVFNATRFASVYAWNRKRISNCVADYSVLYNSASFSTFKCYGVSPTKLNDLCFTNVYADSFVIRGDEVRQIAPGQTGKIADYNYKLPDDFTGCVIAWNSNNLDSKVGGNYNYLYRLFRKSNLKPFERDISTEIYQAGSTPCNGVEGFNCYFPLQSYGFQPTNGVGYQPYRVVVLSFELLHAPATVCGPKKSTNLVKNKCVNFNFNGLTGTGVLTESNKKFLPFQQFGRDIADTTDAVRDPQTLEILDITPCSFGGVSVITPGTNTSNQVAVLYQDVNCTEVPVAIHADQLTPTWRVYSTGSNVFQTRAGCLIGAEHVNNSYECDIPIGAGICASYQTQTNSPQQAQSVASQSIIAYTMSLGAENSVAYSNNSIAIPTNFTISVTTEILPVSMTKTSVDCTMYICGDSTECSNLLLQYGSFCTQLNRALTGIAVEQDKNTQEVFAQVKQIYKTPPIKDFGGFNFSQILPDPSKPSKRSFIEDLLFNKVTLADAGFIKQYGDCLGDIAARDLICAQKFNGLTVLPPLLTDEMIAQYTSALLAGTITSGWTFGAGAALQIPFAMQMAYRFNGIGVTQNVLYENQKLIANQFNSAIGKIQDSLSSTASALGKLQDVVNQNAQALNTLVKQLSSNFGAISSVLNDILSRLDKVEAEVQIDRLITGRLQSLQTYVTQQLIRAAEIRASANLAATKMSECVLGQSKRVDFCGKGYHLMSFPQSAPHGVVFLHVTYVPAQEKNFTTAPAICHDGKAHFPREGVFVSNGTHWFVTQRNFYEPQIITTDNTFVSGNCDVVIGIVNNTVYDPLQPELDSFKEELDKYFKNHTSPDVDLGDISGINASVVNIQKEIDRLNEVAKNLNESLIDLQELGKYEQYIKWPWYIWLGFIAGLIAIVMVTIMLCCMTSCCSCLKGCCSCGSCCKFDEDDSEPVLKGVKLHYT

SEQ ID NO: 4 - protein, 1260 aa, synthetic construct
  REGION 1..1260: note = RECOMBINANT S PROTEIN
QCVNLTTRTQLPPAYTNSFTRGVYYPDKVFRSSVLHSTQDLFLPFFSNVTWFHAIHVSGTNGTKRFDNPVLPFNDGVYFASTEKSNIIRGWIFGTTLDSKTQSLLIVNNATNVVIKVCEFQFCNDPFLGVYYHKNNKSWMESEFRVYSSANNCTFEYVSQPFLMDLEGKQGNFKNLREFVFKNIDGYFKIYSKHTPINLVRDLPQGFSALEPLVDLPIGINITRFQTLLALHRSYLTPGDSSSGWTAGAAAYYVGYLQPRTFLLKYNENGTITDAVDCALDPLSETKCTLKSFTVEKGIYQTSNFRVQPTESIVRFPNITNLCPFGEVFNATRFASVYAWNRKRISNCVADYSVLYNSASFSTFKCYGVSPTKLNDLCFTNVYADSFVIRGDEVRQIAPGQTGKIADYNYKLPDDFTGCVIAWNSNNLDSKVGGNYNYLYRLFRKSNLKPFERDISTEIYQAGSTPCNGVEGFNCYFPLQSYGFQPTNGVGYQPYRVVVLSFELLHAPATVCGPKKSTNLVKNKCVNFNFNGLTGTGVLTESNKKFLPFQQFGRDIADTTDAVRDPQTLEILDITPCSFGGVSVITPGTNTSNQVAVLYQDVNCTEVPVAIHADQLTPTWRVYSTGSNVFQTRAGCLIGAEHVNNSYECDIPIGAGICASYQTQTNSPQQAQSVASQSIIAYTMSLGAENSVAYSNNSIAIPTNFTISVTTEILPVSMTKTSVDCTMYICGDSTECSNLLLQYGSFCTQLNRALTGIAVEQDKNTQEVFAQVKQIYKTPPIKDFGGFNFSQILPDPSKPSKRSFIEDLLFNKVTLADAGFIKQYGDCLGDIAARDLICAQKFNGLTVLPPLLTDEMIAQYTSALLAGTITSGWTFGAGAALQIPFAMQMAYRFNGIGVTQNVLYENQKLIANQFNSAIGKIQDSLSSTASALGKLQDVVNQNAQALNTLVKQLSSNFGAISSVLNDILSRLDKVEAEVQIDRLITGRLQSLQTYVTQQLIRAAEIRASANLAATKMSECVLGQSKRVDFCGKGYHLMSFPQSAPHGVVFLHVTYVPAQEKNFTTAPAICHDGKAHFPREGVFVSNGTHWFVTQRNFYEPQIITTDNTFVSGNCDVVIGIVNNTVYDPLQPELDSFKEELDKYFKNHTSPDVDLGDISGINASVVNIQKEIDRLNEVAKNLNESLIDLQELGKYEQYIKWPWYIWLGFIAGLIAIVMVTIMLCCMTSCCSCLKGCCSCGSCCKFDEDDSEPVLKGVKLHYT

SEQ ID NO: 5 - protein, 13 aa, synthetic construct
  REGION 1..13: note = SIGNAL PEPTIDE
MFVFLVLLPLVSS

SEQ ID NO: 6 - protein, 4 aa, synthetic construct
  REGION 1..4: note = RECOMBINANT FURIN CLEAVAGE SITE
RRAR

SEQ ID NO: 7 - protein, 4 aa, synthetic construct
  REGION 1..4: note = RECOMBINANT FURIN CLEAVAGE SITE
QQAQ

SEQ ID NO: 8 - protein, 4 aa, synthetic construct
  REGION 1..4: note = RECOMBINANT FURIN CLEAVAGE SITE
QRAR

SEQ ID NO: 9 - protein, 4 aa, synthetic construct
  REGION 1..4: note = RECOMBINANT FURIN CLEAVAGE SITE
RQAR

SEQ ID NO: 10 - protein, 4 aa, synthetic construct
  REGION 1..4: note = RECOMBINANT FURIN CLEAVAGE SITE
RRAQ

SEQ ID NO: 11 - protein, 4 aa, synthetic construct
  REGION 1..4: note = RECOMBINANT FURIN CLEAVAGE SITE
QQAR

SEQ ID NO: 12 - protein, 4 aa, synthetic construct
  REGION 1..4: note = RECOMBINANT FURIN CLEAVAGE SITE
RQAQ

SEQ ID NO: 13 - protein, 4 aa, synthetic construct
  REGION 1..4: note = RECOMBINANT FURIN CLEAVAGE SITE
QRAQ

SEQ ID NO: 14 - protein, 4 aa, synthetic construct
  REGION 1..4: note = RECOMBINANT FURIN CLEAVAGE SITE
NNAN

SEQ ID NO: 15 - protein, 4 aa, synthetic construct
  REGION 1..4: note = RECOMBINANT FURIN CLEAVAGE SITE
NRAR

SEQ ID NO: 16 - protein, 4 aa, synthetic construct
  REGION 1..4: note = RECOMBINANT FURIN CLEAVAGE SITE
RNAR

SEQ ID NO: 17 - protein, 4 aa, synthetic construct
  REGION 1..4: note = RECOMBINANT FURIN CLEAVAGE SITE
RRAN

SEQ ID NO: 18 - protein, 4 aa, synthetic construct
  REGION 1..4: note = RECOMBINANT FURIN CLEAVAGE SITE
NNAR

SEQ ID NO: 19 - protein, 4 aa, synthetic construct
  REGION 1..4: note = RECOMBINANT FURIN CLEAVAGE SITE
RNAN

SEQ ID NO: 20 - protein, 4 aa, synthetic construct
  REGION 1..4: note = RECOMBINANT FURIN CLEAVAGE SITE
NRAN

SEQ ID NO: 21 - protein, 4 aa, synthetic construct
  REGION 1..4: note = RECOMBINANT FURIN CLEAVAGE SITE
AAAA

SEQ ID NO: 22 - protein, 4 aa, synthetic construct
  REGION 1..4: note = RECOMBINANT FURIN CLEAVAGE SITE
ARAR

SEQ ID NO: 23 - protein, 4 aa, synthetic construct
  REGION 1..4: note = RECOMBINANT FURIN CLEAVAGE SITE
RAAR

SEQ ID NO: 24 - protein, 4 aa, synthetic construct
  REGION 1..4: note = RECOMBINANT FURIN CLEAVAGE SITE
RRAA

SEQ ID NO: 25 - protein, 4 aa, synthetic construct
  REGION 1..4: note = RECOMBINANT FURIN CLEAVAGE SITE
AAAR

SEQ ID NO: 26 - protein, 4 aa, synthetic construct
  REGION 1..4: note = RECOMBINANT FURIN CLEAVAGE SITE
RAAA

SEQ ID NO: 27 - protein, 4 aa, synthetic construct
  REGION 1..4: note = RECOMBINANT FURIN CLEAVAGE SITE
ARAA

SEQ ID NO: 28 - protein, 4 aa, synthetic construct
  REGION 1..4: note = RECOMBINANT FURIN CLEAVAGE SITE
GGAG

SEQ ID NO: 29 - protein, 4 aa, synthetic construct
  REGION 1..4: note = RECOMBINANT FURIN CLEAVAGE SITE
GRAR

SEQ ID NO: 30 - protein, 4 aa, synthetic construct
  REGION 1..4: note = RECOMBINANT FURIN CLEAVAGE SITE
RGAR

SEQ ID NO: 31 - protein, 4 aa, synthetic construct
  REGION 1..4: note = RECOMBINANT FURIN CLEAVAGE SITE
RRAG

SEQ ID NO: 32 - protein, 4 aa, synthetic construct
  REGION 1..4: note = RECOMBINANT FURIN CLEAVAGE SITE
GGAR

SEQ ID NO: 33 - protein, 4 aa, synthetic construct
  REGION 1..4: note = RECOMBINANT FURIN CLEAVAGE SITE
RGAG

SEQ ID NO: 34 - protein, 4 aa, synthetic construct
  REGION 1..4: note = RECOMBINANT FURIN CLEAVAGE SITE
GRAG

SEQ ID NO: 35 - DNA, 3819 bp, synthetic construct
  misc_feature 1..3819: note = RECOMBINANT SPIKE PROTEIN
  source 1..3819: mol_type = other DNA
atgttcgtcttcctggtgctgctgcccctggtgtccagccagtgcgtgaacctgaccactaggactcagctgcctcccgcttacaccaactcattcactcgcggtgtgtactaccctgacaaggtcttccgttcttcagtgctgcactcaactcaggacctgttcctgcccttcttctccaacgtcacctggttccacgccatccacgtgtccggcaccaacggcactaagcgcttcgacaacccagtgctgcctttcaacgacggtgtctacttcgcttcaaccgagaagtccaacatcatccgtggatggatcttcggcaccactctggacagcaagactcagtctctgctgatcgtcaacaacgccaccaacgtggtcatcaaggtctgcgaattccagttctgcaacgacccattcctgggcgtctactaccacaagaacaacaagtcatggatggagtccgaattccgcgtctactccagcgctaacaactgcactttcgagtacgtgtcccagcctttcctgatggacctggaaggaaagcagggtaacttcaagaacctgagggagttcgtgttcaagaacatcgacggatacttcaagatttacagcaagcacaccccaatcaacctggtgcgcgacctgcctcagggtttctctgctctggagccactggtggacctgcctatcggcatcaacatcacccgcttccagactctgctggctctgcaccgttcctacctgactccaggcgactcatcttctggatggactgctggagctgctgcttactacgtgggctacctgcagcctcgcaccttcctgctgaagtacaacgaaaacggaaccatcactgacgccgtcgactgcgctctggaccctctgtcagaaaccaagtgcactctgaagtccttcaccgtggagaagggcatctaccagacttcaaacttcagggtgcagcccaccgaatccatcgtcagattccctaacatcactaacctgtgccccttcggagaggtcttcaacgccacccgcttcgcttccgtgtacgcctggaacaggaagagaatctcaaactgcgtcgctgactactccgtgctgtacaactcagcctccttcagcaccttcaagtgctacggcgtgtcaccaactaagctgaacgacctgtgcttcaccaacgtctacgccgactccttcgtgatcaggggagacgaggtcagacagatcgctcctggccagactggaaagatcgccgactacaactacaagctgcccgacgacttcaccggttgcgtcatcgcttggaacagcaacaacctggactctaaagtgggtggcaactacaactacctgtaccgcctgttccgtaagtcaaacctgaagccattcgagagggacatcagcactgaaatctaccaggccggatctaccccttgcaacggtgtcgagggcttcaactgctacttccccctgcagtcctacggtttccagccaactaacggtgtgggctaccagccttacagagtggtcgtgctgagcttcgaactgctccacgctcctgctactgtgtgcggtccaaagaagtctaccaacctggtcaagaacaagtgcgtgaacttcaacttcaacggcctgaccggaactggtgtcctgaccgagagcaacaagaagttcctgcccttccagcagttcggaagggacatcgctgacaccactgacgctgtgcgcgaccctcagaccctggaaatcctggacatcactccatgctcattcggaggtgtctccgtgatcacccctggcaccaacacttctaaccaggtcgctgtgctgtaccaggacgtcaactgcaccgaggtccctgtggccatccacgctgaccagctgacccccacttggcgcgtgtactccaccggcagcaacgtgttccagactcgtgctggttgcctgatcggcgccgagcacgtgaacaacagctacgaatgcgacatccccatcggcgctggaatctgcgcctcttaccagacccagactaacagcccacgcagggctcgctctgtggcctctcagtcaatcatcgcttacaccatgtcactgggcgctgaaaactccgtggcctactctaacaactcaatcgccatccccaccaacttcactatcagcgtgaccactgagatcctgccagtcagcatgaccaagacttctgtggactgcactatgtacatctgcggagacagcaccgaatgctctaacctgctgctgcagtacggctctttctgcacccagctgaaccgtgctctgactggaatcgccgtggagcaggacaagaacactcaggaagtcttcgctcaggtgaagcaaatctacaagaccccacctatcaaggacttcggcggattcaacttctcccagatcctgcctgacccctccaagccaagcaagcgctctttcatcgaggacctgctgttcaacaaggtcactctggccgacgctggattcatcaagcagtacggagactgcctgggtgacatcgccgctcgtgacctgatctgcgctcagaagttcaacggtctgaccgtgctgcccccactgctgactgacgaaatgatcgcccagtacactagcgccctgctggctggaaccatcacttctggttggaccttcggtgctggcgccgctctgcagatccctttcgctatgcagatggcctaccgtttcaacggaatcggtgtcacccagaacgtgctgtacgagaaccagaagctgatcgctaaccagttcaactcagccatcggaaagatccaggacagcctgagctctactgcctctgctctgggcaagctgcaggacgtcgtgaaccagaacgcccaggctctgaacaccctggtcaagcagctgtcatccaacttcggtgctatcagctctgtgctgaacgacatcctgtcccgcctggacaaggtcgaggccgaagtgcagatcgaccgcctgatcactggccgtctgcagtcactgcagacctacgtgactcagcagctgatcagggccgctgaaatcagagcctccgctaacctggccgctaccaagatgagcgagtgcgtcctgggtcaatctaagcgtgtggacttctgcggcaagggataccacctgatgtcattccctcagtctgctccccacggtgtggtgttcctgcacgtcacctacgtgccagcccaggagaagaacttcaccactgcccctgctatctgccacgacggcaaggctcacttccccagggaaggtgtcttcgtgagcaacggcacccactggttcgtcactcagagaaacttctacgagccacagatcatcaccactgacaacactttcgtgtctggaaactgcgacgtggtcatcggtatcgtcaacaacaccgtgtacgaccccctgcagccagagctggactcattcaaggaggaactggacaagtacttcaagaaccacacctcccctgacgtcgacctgggcgacatctcaggaatcaacgcttccgtcgtgaacatccagaaggagatcgaccgcctgaacgaagtggccaagaacctgaacgaaagcctgatcgacctgcaggagctgggcaagtacgaacagtacatcaagtggccttggtacatctggctgggtttcatcgctggcctcatcgctatcgtgatggtgaccatcatgctgtgctgcatgacttcatgctgctcctgcctgaagggctgctgcagctgcggatcttgctgcaagttcgacgaggacgactctgaacccgtcctgaagggcgtgaagctgcactacacc

SEQ ID NO: 36 - protein, 1279 aa, synthetic construct
  REGION 1..1279: note = RECOMBINANT SPIKE PROTEIN
MFVFLVLLPLVSSQCVNLTTRTQLPPAYTNSFTRGVYYPDKVFRSSVLHSTQDLFLPFFSNVTWFHAIHVSGTNGTKRFDNPVLPFNDGVYFASTEKSNIIRGWIFGTTLDSKTQSLLIVNNATNVVIKVCEFQFCNDPFLGVYYHKNNKSWMESEFRVYSSANNCTFEYVSQPFLMDLEGKQGNFKNLREFVFKNIDGYFKIYSKHTPINLVRDLPQGFSALEPLVDLPIGINITRFQTLLALHRSYLTPGDSSSGWTAGAAAYYVGYLQPRTFLLKYNENGTITDAVDCALDPLSETKCTLKSFTVEKGIYQTSNFRVQPTESIVRFPNITNLCPFGEVFNATRFASVYAWNRKRISNCVADYSVLYNSASFSTFKCYGVSPTKLNDLCFTNVYADSFVIRGDEVRQIAPGQTGKIADYNYKLPDDFTGCVIAWNSNNLDSKVGGNYNYLYRLFRKSNLKPFERDISTEIYQAGSTPCNGVEGFNCYFPLQSYGFQPTNGVGYQPYRVVVLSFELLHAPATVCGPKKSTNLVKNKCVNFNFNGLTGTGVLTESNKKFLPFQQFGRDIADTTDAVRDPQTLEILDITPCSFGGVSVITPGTNTSNQVAVLYQDVNCTEVPVAIHADQLTPTWRVYSTGSNVFQTRAGCLIGAEHVNNSYECDIPIGAGICASYQTQTNSPRRARSVASQSIIAYTMSLGAENSVAYSNNSIAIPTNFTISVTTEILPVSMTKTSVDCTMYICGDSTECSNLLLQYGSFCTQLNRALTGIAVEQDKNTQEVFAQVKQIYKTPPIKDFGGFNFSQILPDPSKPSKRSFIEDLLFNKVTLADAGFIKQYGDCLGDIAARDLICAQKFNGLTVLPPLLTDEMIAQYTSALLAGTITSGWTFGAGAALQIPFAMQMAYRFNGIGVTQNVLYENQKLIANQFNSAIGKIQDSLSSTASALGKLQDVVNQNAQALNTLVKQLSSNFGAISSVLNDILSRLDKVEAEVQIDRLITGRLQSLQTYVTQQLIRAAEIRASANLAATKMSECVLGQSKRVDFCGKGYHLMSFPQSAPHGVVFLHVTYVPAQEKNFTTAPAICHDGKAHFPREGVFVSNGTHWFVTQRNFYEPQIITTDNTFVSGNCDVVIGIVNNTVYDPLQPELDSFKEELDKYFKNHTSPDVDLGDISGINASVVNIQKEIDRLNEVAKNLNESLIDLQELGKYEQYIKWPWYIWLGFIAGLIAIVMVTIMLCCMTSCCSCLKGCCSCGSCCKFDEDDSEPVLKGVKLHYTHHHHHH

SEQ ID NO: 37 - DNA, 3837 bp, synthetic construct
  misc_feature 1..3837: note = RECOMBINANT SPIKE PROTEIN
  source 1..3837: mol_type = other DNA
atgttcgtcttcctggtgctgctgcccctggtgtccagccagtgcgtgaacctgaccactaggactcagctgcctcccgcttacaccaactcattcactcgcggtgtgtactaccctgacaaggtcttccgttcttcagtgctgcactcaactcaggacctgttcctgcccttcttctccaacgtcacctggttccacgccatccacgtgtccggcaccaacggcactaagcgcttcgacaacccagtgctgcctttcaacgacggtgtctacttcgcttcaaccgagaagtccaacatcatccgtggatggatcttcggcaccactctggacagcaagactcagtctctgctgatcgtcaacaacgccaccaacgtggtcatcaaggtctgcgaattccagttctgcaacgacccattcctgggcgtctactaccacaagaacaacaagtcatggatggagtccgaattccgcgtctactccagcgctaacaactgcactttcgagtacgtgtcccagcctttcctgatggacctggaaggaaagcagggtaacttcaagaacctgagggagttcgtgttcaagaacatcgacggatacttcaagatttacagcaagcacaccccaatcaacctggtgcgcgacctgcctcagggtttctctgctctggagccactggtggacctgcctatcggcatcaacatcacccgcttccagactctgctggctctgcaccgttcctacctgactccaggcgactcatcttctggatggactgctggagctgctgcttactacgtgggctacctgcagcctcgcaccttcctgctgaagtacaacgaaaacggaaccatcactgacgccgtcgactgcgctctggaccctctgtcagaaaccaagtgcactctgaagtccttcaccgtggagaagggcatctaccagacttcaaacttcagggtgcagcccaccgaatccatcgtcagattccctaacatcactaacctgtgccccttcggagaggtcttcaacgccacccgcttcgcttccgtgtacgcctggaacaggaagagaatctcaaactgcgtcgctgactactccgtgctgtacaactcagcctccttcagcaccttcaagtgctacggcgtgtcaccaactaagctgaacgacctgtgcttcaccaacgtctacgccgactccttcgtgatcaggggagacgaggtcagacagatcgctcctggccagactggaaagatcgccgactacaactacaagctgcccgacgacttcaccggttgcgtcatcgcttggaacagcaacaacctggactctaaagtgggtggcaactacaactacctgtaccgcctgttccgtaagtcaaacctgaagccattcgagagggacatcagcactgaaatctaccaggccggatctaccccttgcaacggtgtcgagggcttcaactgctacttccccctgcagtcctacggtttccagccaactaacggtgtgggctaccagccttacagagtggtcgtgctgagcttcgaactgctccacgctcctgctactgtgtgcggtccaaagaagtctaccaacctggtcaagaacaagtgcgtgaacttcaacttcaacggcctgaccggaactggtgtcctgaccgagagcaacaagaagttcctgcccttccagcagttcggaagggacatcgctgacaccactgacgctgtgcgcgaccctcagaccctggaaatcctggacatcactccatgctcattcggaggtgtctccgtgatcacccctggcaccaacacttctaaccaggtcgctgtgctgtaccaggacgtcaactgcaccgaggtccctgtggccatccacgctgaccagctgacccccacttggcgcgtgtactccaccggcagcaacgtgttccagactcgtgctggttgcctgatcggcgccgagcacgtgaacaacagctacgaatgcgacatccccatcggcgctggaatctgcgcctcttaccagacccagactaacagcccacgcagggctcgctctgtggcctctcagtcaatcatcgcttacaccatgtcactgggcgctgaaaactccgtggcctactctaacaactcaatcgccatccccaccaacttcactatcagcgtgaccactgagatcctgccagtcagcatgaccaagacttctgtggactgcactatgtacatctgcggagacagcaccgaatgctctaacctgctgctgcagtacggctctttctgcacccagctgaaccgtgctctgactggaatcgccgtggagcaggacaagaacactcaggaagtcttcgctcaggtgaagcaaatctacaagaccccacctatcaaggacttcggcggattcaacttctcccagatcctgcctgacccctccaagccaagcaagcgctctttcatcgaggacctgctgttcaacaaggtcactctggccgacgctggattcatcaagcagtacggagactgcctgggtgacatcgccgctcgtgacctgatctgcgctcagaagttcaacggtctgaccgtgctgcccccactgctgactgacgaaatgatcgcccagtacactagcgccctgctggctggaaccatcacttctggttggaccttcggtgctggcgccgctctgcagatccctttcgctatgcagatggcctaccgtttcaacggaatcggtgtcacccagaacgtgctgtacgagaaccagaagctgatcgctaaccagttcaactcagccatcggaaagatccaggacagcctgagctctactgcctctgctctgggcaagctgcaggacgtcgtgaaccagaacgcccaggctctgaacaccctggtcaagcagctgtcatccaacttcggtgctatcagctctgtgctgaacgacatcctgtcccgcctggacaaggtcgaggccgaagtgcagatcgaccgcctgatcactggccgtctgcagtcactgcagacctacgtgactcagcagctgatcagggccgctgaaatcagagcctccgctaacctggccgctaccaagatgagcgagtgcgtcctgggtcaatctaagcgtgtggacttctgcggcaagggataccacctgatgtcattccctcagtctgctccccacggtgtggtgttcctgcacgtcacctacgtgccagcccaggagaagaacttcaccactgcccctgctatctgccacgacggcaaggctcacttccccagggaaggtgtcttcgtgagcaacggcacccactggttcgtcactcagagaaacttctacgagccacagatcatcaccactgacaacactttcgtgtctggaaactgcgacgtggtcatcggtatcgtcaacaacaccgtgtacgaccccctgcagccagagctggactcattcaaggaggaactggacaagtacttcaagaaccacacctcccctgacgtcgacctgggcgacatctcaggaatcaacgcttccgtcgtgaacatccagaaggagatcgaccgcctgaacgaagtggccaagaacctgaacgaaagcctgatcgacctgcaggagctgggcaagtacgaacagtacatcaagtggccttggtacatctggctgggtttcatcgctggcctcatcgctatcgtgatggtgaccatcatgctgtgctgcatgacttcatgctgctcctgcctgaagggctgctgcagctgcggatcttgctgcaagttcgacgaggacgactctgaacccgtcctgaagggcgtgaagctgcactacacccaccaccaccaccaccac

SEQ ID NO: 38 - protein, 1266 aa, synthetic construct
  REGION 1..1266: note = RECOMBINANT SPIKE PROTEIN
QCVNLTTRTQLPPAYTNSFTRGVYYPDKVFRSSVLHSTQDLFLPFFSNVTWFHAIHVSGTNGTKRFDNPVLPFNDGVYFASTEKSNIIRGWIFGTTLDSKTQSLLIVNNATNVVIKVCEFQFCNDPFLGVYYHKNNKSWMESEFRVYSSANNCTFEYVSQPFLMDLEGKQGNFKNLREFVFKNIDGYFKIYSKHTPINLVRDLPQGFSALEPLVDLPIGINITRFQTLLALHRSYLTPGDSSSGWTAGAAAYYVGYLQPRTFLLKYNENGTITDAVDCALDPLSETKCTLKSFTVEKGIYQTSNFRVQPTESIVRFPNITNLCPFGEVFNATRFASVYAWNRKRISNCVADYSVLYNSASFSTFKCYGVSPTKLNDLCFTNVYADSFVIRGDEVRQIAPGQTGKIADYNYKLPDDFTGCVIAWNSNNLDSKVGGNYNYLYRLFRKSNLKPFERDISTEIYQAGSTPCNGVEGFNCYFPLQSYGFQPTNGVGYQPYRVVVLSFELLHAPATVCGPKKSTNLVKNKCVNFNFNGLTGTGVLTESNKKFLPFQQFGRDIADTTDAVRDPQTLEILDITPCSFGGVSVITPGTNTSNQVAVLYQDVNCTEVPVAIHADQLTPTWRVYSTGSNVFQTRAGCLIGAEHVNNSYECDIPIGAGICASYQTQTNSPRRARSVASQSIIAYTMSLGAENSVAYSNNSIAIPTNFTISVTTEILPVSMTKTSVDCTMYICGDSTECSNLLLQYGSFCTQLNRALTGIAVEQDKNTQEVFAQVKQIYKTPPIKDFGGFNFSQILPDPSKPSKRSFIEDLLFNKVTLADAGFIKQYGDCLGDIAARDLICAQKFNGLTVLPPLLTDEMIAQYTSALLAGTITSGWTFGAGAALQIPFAMQMAYRFNGIGVTQNVLYENQKLIANQFNSAIGKIQDSLSSTASALGKLQDVVNQNAQALNTLVKQLSSNFGAISSVLNDILSRLDKVEAEVQIDRLITGRLQSLQTYVTQQLIRAAEIRASANLAATKMSECVLGQSKRVDFCGKGYHLMSFPQSAPHGVVFLHVTYVPAQEKNFTTAPAICHDGKAHFPREGVFVSNGTHWFVTQRNFYEPQIITTDNTFVSGNCDVVIGIVNNTVYDPLQPELDSFKEELDKYFKNHTSPDVDLGDISGINASVVNIQKEIDRLNEVAKNLNESLIDLQELGKYEQYIKWPWYIWLGFIAGLIAIVMVTIMLCCMTSCCSCLKGCCSCGSCCKFDEDDSEPVLKGVKLHYTHHHHHH

SEQ ID NO: 39 - protein, 60 aa, synthetic construct
  REGION 1..60: note = RECOMBINANT SPIKE PROTEIN
WYIWLGFIAGLIAIVMVTIMLCCMTSCCSCLKGCCSCGSCCKFDEDDSEPVLKGVKLHYT

SEQ ID NO: 40 - protein, 1213 aa, synthetic construct
  REGION 1..1213: note = RECOMBINANT SPIKE PROTEIN
MFVFLVLLPLVSSQCVNLTTRTQLPPAYTNSFTRGVYYPDKVFRSSVLHSTQDLFLPFFSNVTWFHAIHVSGTNGTKRFDNPVLPFNDGVYFASTEKSNIIRGWIFGTTLDSKTQSLLIVNNATNVVIKVCEFQFCNDPFLGVYYHKNNKSWMESEFRVYSSANNCTFEYVSQPFLMDLEGKQGNFKNLREFVFKNIDGYFKIYSKHTPINLVRDLPQGFSALEPLVDLPIGINITRFQTLLALHRSYLTPGDSSSGWTAGAAAYYVGYLQPRTFLLKYNENGTITDAVDCALDPLSETKCTLKSFTVEKGIYQTSNFRVQPTESIVRFPNITNLCPFGEVFNATRFASVYAWNRKRISNCVADYSVLYNSASFSTFKCYGVSPTKLNDLCFTNVYADSFVIRGDEVRQIAPGQTGKIADYNYKLPDDFTGCVIAWNSNNLDSKVGGNYNYLYRLFRKSNLKPFERDISTEIYQAGSTPCNGVEGFNCYFPLQSYGFQPTNGVGYQPYRVVVLSFELLHAPATVCGPKKSTNLVKNKCVNFNFNGLTGTGVLTESNKKFLPFQQFGRDIADTTDAVRDPQTLEILDITPCSFGGVSVITPGTNTSNQVAVLYQDVNCTEVPVAIHADQLTPTWRVYSTGSNVFQTRAGCLIGAEHVNNSYECDIPIGAGICASYQTQTNSPRRARSVASQSIIAYTMSLGAENSVAYSNNSIAIPTNFTISVTTEILPVSMTKTSVDCTMYICGDSTECSNLLLQYGSFCTQLNRALTGIAVEQDKNTQEVFAQVKQIYKTPPIKDFGGFNFSQILPDPSKPSKRSFIEDLLFNKVTLADAGFIKQYGDCLGDIAARDLICAQKFNGLTVLPPLLTDEMIAQYTSALLAGTITSGWTFGAGAALQIPFAMQMAYRFNGIGVTQNVLYENQKLIANQFNSAIGKIQDSLSSTASALGKLQDVVNQNAQALNTLVKQLSSNFGAISSVLNDILSRLDKVEAEVQIDRLITGRLQSLQTYVTQQLIRAAEIRASANLAATKMSECVLGQSKRVDFCGKGYHLMSFPQSAPHGVVFLHVTYVPAQEKNFTTAPAICHDGKAHFPREGVFVSNGTHWFVTQRNFYEPQIITTDNTFVSGNCDVVIGIVNNTVYDPLQPELDSFKEELDKYFKNHTSPDVDLGDISGINASVVNIQKEIDRLNEVAKNLNESLIDLQELGKYEQYIKWP

SEQ ID NO: 41 - protein, 1200 aa, synthetic construct
  REGION 1..1200: note = RECOMBINANT SPIKE PROTEIN
QCVNLTTRTQLPPAYTNSFTRGVYYPDKVFRSSVLHSTQDLFLPFFSNVTWFHAIHVSGTNGTKRFDNPVLPFNDGVYFASTEKSNIIRGWIFGTTLDSKTQSLLIVNNATNVVIKVCEFQFCNDPFLGVYYHKNNKSWMESEFRVYSSANNCTFEYVSQPFLMDLEGKQGNFKNLREFVFKNIDGYFKIYSKHTPINLVRDLPQGFSALEPLVDLPIGINITRFQTLLALHRSYLTPGDSSSGWTAGAAAYYVGYLQPRTFLLKYNENGTITDAVDCALDPLSETKCTLKSFTVEKGIYQTSNFRVQPTESIVRFPNITNLCPFGEVFNATRFASVYAWNRKRISNCVADYSVLYNSASFSTFKCYGVSPTKLNDLCFTNVYADSFVIRGDEVRQIAPGQTGKIADYNYKLPDDFTGCVIAWNSNNLDSKVGGNYNYLYRLFRKSNLKPFERDISTEIYQAGSTPCNGVEGFNCYFPLQSYGFQPTNGVGYQPYRVVVLSFELLHAPATVCGPKKSTNLVKNKCVNFNFNGLTGTGVLTESNKKFLPFQQFGRDIADTTDAVRDPQTLEILDITPCSFGGVSVITPGTNTSNQVAVLYQDVNCTEVPVAIHADQLTPTWRVYSTGSNVFQTRAGCLIGAEHVNNSYECDIPIGAGICASYQTQTNSPRRARSVASQSIIAYTMSLGAENSVAYSNNSIAIPTNFTISVTTEILPVSMTKTSVDCTMYICGDSTECSNLLLQYGSFCTQLNRALTGIAVEQDKNTQEVFAQVKQIYKTPPIKDFGGFNFSQILPDPSKPSKRSFIEDLLFNKVTLADAGFIKQYGDCLGDIAARDLICAQKFNGLTVLPPLLTDEMIAQYTSALLAGTITSGWTFGAGAALQIPFAMQMAYRFNGIGVTQNVLYENQKLIANQFNSAIGKIQDSLSSTASALGKLQDVVNQNAQALNTLVKQLSSNFGAISSVLNDILSRLDKVEAEVQIDRLITGRLQSLQTYVTQQLIRAAEIRASANLAATKMSECVLGQSKRVDFCGKGYHLMSFPQSAPHGVVFLHVTYVPAQEKNFTTAPAICHDGKAHFPREGVFVSNGTHWFVTQRNFYEPQIITTDNTFVSGNCDVVIGIVNNTVYDPLQPELDSFKEELDKYFKNHTSPDVDLGDISGINASVVNIQKEIDRLNEVAKNLNESLIDLQELGKYEQYIKWP

SEQ ID NO: 42 - protein, 1219 aa, synthetic construct
  REGION 1..1219: note = RECOMBINANT SPIKE PROTEIN
MFVFLVLLPLVSSQCVNLTTRTQLPPAYTNSFTRGVYYPDKVFRSSVLHSTQDLFLPFFSNVTWFHAIHVSGTNGTKRFDNPVLPFNDGVYFASTEKSNIIRGWIFGTTLDSKTQSLLIVNNATNVVIKVCEFQFCNDPFLGVYYHKNNKSWMESEFRVYSSANNCTFEYVSQPFLMDLEGKQGNFKNLREFVFKNIDGYFKIYSKHTPINLVRDLPQGFSALEPLVDLPIGINITRFQTLLALHRSYLTPGDSSSGWTAGAAAYYVGYLQPRTFLLKYNENGTITDAVDCALDPLSETKCTLKSFTVEKGIYQTSNFRVQPTESIVRFPNITNLCPFGEVFNATRFASVYAWNRKRISNCVADYSVLYNSASFSTFKCYGVSPTKLNDLCFTNVYADSFVIRGDEVRQIAPGQTGKIADYNYKLPDDFTGCVIAWNSNNLDSKVGGNYNYLYRLFRKSNLKPFERDISTEIYQAGSTPCNGVEGFNCYFPLQSYGFQPTNGVGYQPYRVVVLSFELLHAPATVCGPKKSTNLVKNKCVNFNFNGLTGTGVLTESNKKFLPFQQFGRDIADTTDAVRDPQTLEILDITPCSFGGVSVITPGTNTSNQVAVLYQDVNCTEVPVAIHADQLTPTWRVYSTGSNVFQTRAGCLIGAEHVNNSYECDIPIGAGICASYQTQTNSPRRARSVASQSIIAYTMSLGAENSVAYSNNSIAIPTNFTISVTTEILPVSMTKTSVDCTMYICGDSTECSNLLLQYGSFCTQLNRALTGIAVEQDKNTQEVFAQVKQIYKTPPIKDFGGFNFSQILPDPSKPSKRSFIEDLLFNKVTLADAGFIKQYGDCLGDIAARDLICAQKFNGLTVLPPLLTDEMIAQYTSALLAGTITSGWTFGAGAALQIPFAMQMAYRFNGIGVTQNVLYENQKLIANQFNSAIGKIQDSLSSTASALGKLQDVVNQNAQALNTLVKQLSSNFGAISSVLNDILSRLDKVEAEVQIDRLITGRLQSLQTYVTQQLIRAAEIRASANLAATKMSECVLGQSKRVDFCGKGYHLMSFPQSAPHGVVFLHVTYVPAQEKNFTTAPAICHDGKAHFPREGVFVSNGTHWFVTQRNFYEPQIITTDNTFVSGNCDVVIGIVNNTVYDPLQPELDSFKEELDKYFKNHTSPDVDLGDISGINASVVNIQKEIDRLNEVAKNLNESLIDLQELGKYEQYIKWPHHHHHH

SEQ ID NO: 43 - DNA, 3657 bp, synthetic construct
  misc_feature 1..3657: note = RECOMBINANT SPIKE PROTEIN
  source 1..3657: mol_type = other DNA
atgttcgtcttcctggtgctgctgcccctggtgtccagccagtgcgtgaacctgaccactaggactcagctgcctcccgcttacaccaactcattcactcgcggtgtgtactaccctgacaaggtcttccgttcttcagtgctgcactcaactcaggacctgttcctgcccttcttctccaacgtcacctggttccacgccatccacgtgtccggcaccaacggcactaagcgcttcgacaacccagtgctgcctttcaacgacggtgtctacttcgcttcaaccgagaagtccaacatcatccgtggatggatcttcggcaccactctggacagcaagactcagtctctgctgatcgtcaacaacgccaccaacgtggtcatcaaggtctgcgaattccagttctgcaacgacccattcctgggcgtctactaccacaagaacaacaagtcatggatggagtccgaattccgcgtctactccagcgctaacaactgcactttcgagtacgtgtcccagcctttcctgatggacctggaaggaaagcagggtaacttcaagaacctgagggagttcgtgttcaagaacatcgacggatacttcaagatttacagcaagcacaccccaatcaacctggtgcgcgacctgcctcagggtttctctgctctggagccactggtggacctgcctatcggcatcaacatcacccgcttccagactctgctggctctgcaccgttcctacctgactccaggcgactcatcttctggatggactgctggagctgctgcttactacgtgggctacctgcagcctcgcaccttcctgctgaagtacaacgaaaacggaaccatcactgacgccgtcgactgcgctctggaccctctgtcagaaaccaagtgcactctgaagtccttcaccgtggagaagggcatctaccagacttcaaacttcagggtgcagcccaccgaatccatcgtcagattccctaacatcactaacctgtgccccttcggagaggtcttcaacgccacccgcttcgcttccgtgtacgcctggaacaggaagagaatctcaaactgcgtcgctgactactccgtgctgtacaactcagcctccttcagcaccttcaagtgctacggcgtgtcaccaactaagctgaacgacctgtgcttcaccaacgtctacgccgactccttcgtgatcaggggagacgaggtcagacagatcgctcctggccagactggaaagatcgccgactacaactacaagctgcccgacgacttcaccggttgcgtcatcgcttggaacagcaacaacctggactctaaagtgggtggcaactacaactacctgtaccgcctgttccgtaagtcaaacctgaagccattcgagagggacatcagcactgaaatctaccaggccggatctaccccttgcaacggtgtcgagggcttcaactgctacttccccctgcagtcctacggtttccagccaactaacggtgtgggctaccagccttacagagtggtcgtgctgagcttcgaactgctccacgctcctgctactgtgtgcggtccaaagaagtctaccaacctggtcaagaacaagtgcgtgaacttcaacttcaacggcctgaccggaactggtgtcctgaccgagagcaacaagaagttcctgcccttccagcagttcggaagggacatcgctgacaccactgacgctgtgcgcgaccctcagaccctggaaatcctggacatcactccatgctcattcggaggtgtctccgtgatcacccctggcaccaacacttctaaccaggtcgctgtgctgtaccaggacgtcaactgcaccgaggtccctgtggccatccacgctgaccagctgacccccacttggcgcgtgtactccaccggcagcaacgtgttccagactcgtgctggttgcctgatcggcgccgagcacgtgaacaacagctacgaatgcgacatccccatcggcgctggaatctgcgcctcttaccagacccagactaacagcccacgcagggctcgctctgtggcctctcagtcaatcatcgcttacaccatgtcactgggcgctgaaaactccgtggcctactctaacaactcaatcgccatccccaccaacttcactatcagcgtgaccactgagatcctgccagtcagcatgaccaagacttctgtggactgcactatgtacatctgcggagacagcaccgaatgctctaacctgctgctgcagtacggctctttctgcacccagctgaaccgtgctctgactggaatcgccgtggagcaggacaagaacactcaggaagtcttcgctcaggtgaagcaaatctacaagaccccacctatcaaggacttcggcggattcaacttctcccagatcctgcctgacccctccaagccaagcaagcgctctttcatcgaggacctgctgttcaacaaggtcactctggccgacgctggattcatcaagcagtacggagactgcctgggtgacatcgccgctcgtgacctgatctgcgctcagaagttcaacggtctgaccgtgctgcccccactgctgactgacgaaatgatcgcccagtacactagcgccctgctggctggaaccatcacttctggttggaccttcggtgctggcgccgctctgcagatccctttcgctatgcagatggcctaccgtttcaacggaatcggtgtcacccagaacgtgctgtacgagaaccagaagctgatcgctaaccagttcaactcagccatcggaaagatccaggacagcctgagctctactgcctctgctctgggcaagctgcaggacgtcgtgaaccagaacgcccaggctctgaacaccctggtcaagcagctgtcatccaacttcggtgctatcagctctgtgctgaacgacatcctgtcccgcctggacaaggtcgaggccgaagtgcagatcgaccgcctgatcactggccgtctgcagtcactgcagacctacgtgactcagcagctgatcagggccgctgaaatcagagcctccgctaacctggccgctaccaagatgagcgagtgcgtcctgggtcaatctaagcgtgtggacttctgcggcaagggataccacctgatgtcattccctcagtctgctccccacggtgtggtgttcctgcacgtcacctacgtgccagcccaggagaagaacttcaccactgcccctgctatctgccacgacggcaaggctcacttccccagggaaggtgtcttcgtgagcaacggcacccactggttcgtcactcagagaaacttctacgagccacagatcatcaccactgacaacactttcgtgtctggaaactgcgacgtggtcatcggtatcgtcaacaacaccgtgtacgaccccctgcagccagagctggactcattcaaggaggaactggacaagtacttcaagaaccacacctcccctgacgtcgacctgggcgacatctcaggaatcaacgcttccgtcgtgaacatccagaaggagatcgaccgcctgaacgaagtggccaagaacctgaacgaaagcctgatcgacctgcaggagctgggcaagtacgaacagtacatcaagtggcctcaccaccaccaccaccac

SEQ ID NO: 44 - protein, 1219 aa, synthetic construct; identical to SEQ ID NO: 42
  REGION 1..1219: note = RECOMBINANT SPIKE PROTEIN

SEQ ID NO: 45 - protein, 318 aa, synthetic construct
  REGION 1..318: note = RECOMBINANT SPIKE PROTEIN
QCVNLTTRTQLPPAYTNSFTRGVYYPDKVFRSSVLHSTQDLFLPFFSNVTWFHAIHVSGTNGTKRFDNPVLPFNDGVYFASTEKSNIIRGWIFGTTLDSKTQSLLIVNNATNVVIKVCEFQFCNDPFLGVYYHKNNKSWMESEFRVYSSANNCTFEYVSQPFLMDLEGKQGNFKNLREFVFKNIDGYFKIYSKHTPINLVRDLPQGFSALEPLVDLPIGINITRFQTLLALHRSYLTPGDSSSGWTAGAAAYYVGYLQPRTFLLKYNENGTITDAVDCALDPLSETKCTLKSFTVEKGIYQTSNFRVQPTESIVRFPN

SEQ ID NO: 46 - protein, 955 aa, synthetic construct
  REGION 1..955: note = RECOMBINANT SPIKE PROTEIN
MFVFLVLLPLVSSITNLCPFGEVFNATRFASVYAWNRKRISNCVADYSVLYNSASFSTFKCYGVSPTKLNDLCFTNVYADSFVIRGDEVRQIAPGQTGKIADYNYKLPDDFTGCVIAWNSNNLDSKVGGNYNYLYRLFRKSNLKPFERDISTEIYQAGSTPCNGVEGFNCYFPLQSYGFQPTNGVGYQPYRVVVLSFELLHAPATVCGPKKSTNLVKNKCVNFNFNGLTGTGVLTESNKKFLPFQQFGRDIADTTDAVRDPQTLEILDITPCSFGGVSVITPGTNTSNQVAVLYQDVNCTEVPVAIHADQLTPTWRVYSTGSNVFQTRAGCLIGAEHVNNSYECDIPIGAGICASYQTQTNSPRRARSVASQSIIAYTMSLGAENSVAYSNNSIAIPTNFTISVTTEILPVSMTKTSVDCTMYICGDSTECSNLLLQYGSFCTQLNRALTGIAVEQDKNTQEVFAQVKQIYKTPPIKDFGGFNFSQILPDPSKPSKRSFIEDLLFNKVTLADAGFIKQYGDCLGDIAARDLICAQKFNGLTVLPPLLTDEMIAQYTSALLAGTITSGWTFGAGAALQIPFAMQMAYRFNGIGVTQNVLYENQKLIANQFNSAIGKIQDSLSSTASALGKLQDVVNQNAQALNTLVKQLSSNFGAISSVLNDILSRLDKVEAEVQIDRLITGRLQSLQTYVTQQLIRAAEIRASANLAATKMSECVLGQSKRVDFCGKGYHLMSFPQSAPHGVVFLHVTYVPAQEKNFTTAPAICHDGKAHFPREGVFVSNGTHWFVTQRNFYEPQIITTDNTFVSGNCDVVIGIVNNTVYDPLQPELDSFKEELDKYFKNHTSPDVDLGDISGINASVVNIQKEIDRLNEVAKNLNESLIDLQELGKYEQYIKWPWYIWLGFIAGLIAIVMVTIMLCCMTSCCSCLKGCCSCGSCCKFDEDDSEPVLKGVKLHYT

SEQ ID NO: 47 - DNA, 2868 bp, synthetic construct
  misc_feature 1..2868: note = RECOMBINANT SPIKE PROTEIN
  source 1..2868: mol_type = other DNA
atgttcgtcttcctggtgctgctgcccctggtgtccagcatcactaacctgtgccccttcggagaggtcttcaacgccacccgcttcgcttccgtgtacgcctggaacaggaagagaatctcaaactgcgtcgctgactactccgtgctgtacaactcagcctccttcagcaccttcaagtgctacggcgtgtcaccaactaagctgaacgacctgtgcttcaccaacgtctacgccgactccttcgtgatcaggggagacgaggtcagacagatcgctcctggccagactggaaagatcgccgactacaactacaagctgcccgacgacttcaccggttgcgtcatcgcttggaacagcaacaacctggactctaaagtgggtggcaactacaactacctgtaccgcctgttccgtaagtcaaacctgaagccattcgagagggacatcagcactgaaatctaccaggccggatctaccccttgcaacggtgtcgagggcttcaactgctacttccccctgcagtcctacggtttccagccaactaacggtgtgggctaccagccttacagagtggtcgtgctgagcttcgaactgctccacgctcctgctactgtgtgcggtccaaagaagtctaccaacctggtcaagaacaagtgcgtgaacttcaacttcaacggcctgaccggaactggtgtcctgaccgagagcaacaagaagttcctgcccttccagcagttcggaagggacatcgctgacaccactgacgctgtgcgcgaccctcagaccctggaaatcctggacatcactccatgctcattcggaggtgtctccgtgatcacccctggcaccaacacttctaaccaggtcgctgtgctgtaccaggacgtcaactgcaccgaggtccctgtggccatccacgctgaccagctgacccccacttggcgcgtgtactccaccggcagcaacgtgttccagactcgtgctggttgcctgatcggcgccgagcacgtgaacaacagctacgaatgcgacatccccatcggcgctggaatctgcgcctcttaccagacccagactaacagcccacgcagggctcgctctgtggcctctcagtcaatcatcgcttacaccatgtcactgggcgctgaaaactccgtggcctactctaacaactcaatcgccatccccaccaacttcactatcagcgtgaccactgagatcctgccagtcagcatgaccaagacttctgtggactgcactatgtacatctgcggagacagcaccgaatgctctaacctgctgctgcagtacggctctttctgcacccagctgaaccgtgctctgactggaatcgccgtggagcaggacaagaacactcaggaagtcttcgctcaggtgaagcaaatctacaagaccccacctatcaaggacttcggcggattcaacttctcccagatcctgcctgacccctccaagccaagcaagcgctctttcatcgaggacctgctgttcaacaaggtcactctggccgacgctggattcatcaagcagtacggagactgcctgggtgacatcgccgctcgtgacctgatctgcgctcagaagttcaacggtctgaccgtgctgcccccactgctgactgacgaaatgatcgcccagtacactagcgccctgctggctggaaccatcacttctggttggaccttcggtgctggcgccgctctgcagatccctttcgctatgcagatggcctaccgtttcaacggaatcggtgtcacccagaacgtgctgtacgagaaccagaagctgatcgctaaccagttcaactcagccatcggaaagatccaggacagcctgagctctactgcctctgctctgggcaagctgcaggacgtcgtgaaccagaacgcccaggctctgaacaccctggtcaagcagctgtcatccaacttcggtgctatcagctctgtgctgaacgacatcctgtcccgcctggacaaggtcgaggccgaagtgcagatcgaccgcctgatcactggccgtctgcagtcactgcagacctacgtgactcagcagctgatcagggccgctgaaatcagagcctccgctaacctggccgctaccaagatgagcgagtgcgtcctgggtcaatctaagcgtgtggacttctgcggcaagggataccacctgatgtcattccctcagtctgctccccacggtgtggtgttcctgcacgtcacctacgtgccagcccaggagaagaacttcaccactgcccctgctatctgccacgacggcaaggctcacttccccagggaaggtgtcttcgtgagcaacggcacccactggttcgtcactcagagaaacttctacgagccacagatcatcaccactgacaacactttcgtgtctggaaactgcgacgtggtcatcggtatcgtcaacaacaccgtgtacgaccccctgcagccagagctggactcattcaaggaggaactggacaagtacttcaagaaccacacctcccctgacgtcgacctgggcgacatctcaggaatcaacgcttccgtcgtgaacatccagaaggagatcgaccgcctgaacgaagtggccaagaacctgaacgaaagcctgatcgacctgcaggagctgggcaagtacgaacagtacatcaagtggccttggtacatctggctgggtttcatcgctggcctcatcgctatcgtgatggtgaccatcatgctgtgctgcatgacttcatgctgctcctgcctgaagggctgctgcagctgcggatcttgctgcaagttcgacgaggacgactctgaacccgtcctgaagggcgtgaagctgcactacacctaa

SEQ ID NO: 48 - protein, 942 aa, synthetic construct
  REGION 1..942: note = RECOMBINANT SPIKE PROTEIN
ITNLCPFGEVFNATRFASVYAWNRKRISNCVADYSVLYNSASFSTFKCYGVSPTKLNDLCFTNVYADSFVIRGDEVRQIAPGQTGKIADYNYKLPDDFTGCVIAWNSNNLDSKVGGNYNYLYRLFRKSNLKPFERDISTEIYQAGSTPCNGVEGFNCYFPLQSYGFQPTNGVGYQPYRVVVLSFELLHAPATVCGPKKSTNLVKNKCVNFNFNGLTGTGVLTESNKKFLPFQQFGRDIADTTDAVRDPQTLEILDITPCSFGGVSVITPGTNTSNQVAVLYQDVNCTEVPVAIHADQLTPTWRVYSTGSNVFQTRAGCLIGAEHVNNSYECDIPIGAGICASYQTQTNSPRRARSVASQSIIAYTMSLGAENSVAYSNNSIAIPTNFTISVTTEILPVSMTKTSVDCTMYICGDSTECSNLLLQYGSFCTQLNRALTGIAVEQDKNTQEVFAQVKQIYKTPPIKDFGGFNFSQILPDPSKPSKRSFIEDLLFNKVTLADAGFIKQYGDCLGDIAARDLICAQKFNGLTVLPPLLTDEMIAQYTSALLAGTITSGWTFGAGAALQIPFAMQMAYRFNGIGVTQNVLYENQKLIANQFNSAIGKIQDSLSSTASALGKLQDVVNQNAQALNTLVKQLSSNFGAISSVLNDILSRLDKVEAEVQIDRLITGRLQSLQTYVTQQLIRAAEIRASANLAATKMSECVLGQSKRVDFCGKGYHLMSFPQSAPHGVVFLHVTYVPAQEKNFTTAPAICHDGKAHFPREGVFVSNGTHWFVTQRNFYEPQIITTDNTFVSGNCDVVIGIVNNTVYDPLQPELDSFKEELDKYFKNHTSPDVDLGDISGINASVVNIQKEIDRLNEVAKNLNESLIDLQELGKYEQYIKWPWYIWLGFIAGLIAIVMVTIMLCCMTSCCSCLKGCCSCGSCCKFDEDDSEPVLKGVKLHYT

SEQ ID NO: 49 - protein, 960 aa, synthetic construct
  REGION 1..960: note = RECOMBINANT SPIKE PROTEIN
MFVFLVLLPLVSSITNLCPFGEVFNATRFASVYAWNRKRISNCVADYSVLYNSASFSTFKCYGVSPTKLNDLCFTNVYADSFVIRGDEVRQIAPGQTGKIADYNYKLPDDFTGCVIAWNSNNLDSKVGGNYNYLYRLFRKSNLKPFERDISTEIYQAGSTPCNGVEGFNCYFPLQSYGFQPTNGVGYQPYRVVVLSFELLHAPATVCGPKKSTNLVKNKCVNFNFNGLTGTGVLTESNKKFLPFQQFGRDIADTTDAVRDPQTLEILDITPCSFGGVSVITPGTNTSNQVAVLYQDVNCTEVPVAIHADQLTPTWRVYSTGSNVFQTRAGCLIGAEHVNNSYECDIPIGAGICASYQTQTNSPRRARSVASQSIIAYTMSLGAENSVAYSNNSIAIPTNFTISVTTEILPVSMTKTSVDCTMYICGDSTECSNLLLQYGSFCTQLNRALTGIAVEQDKNTQEVFAQVKQIYKTPPIKDFGGFNFSQILPDPSKPSKRSFIEDLLFNKVTLADAGFIKQYGDCLGDIAARDLICAQKFNGLTVLPPLLTDEMIAQYTSALLAGTITSGWTFGAGAALQIPFAMQMAYRFNGIGVTQNVLYENQKLIANQFNSAIGKIQDSLSSTASALGKLQDVVNQNAQALNTLVKQLSSNFGAISSVLNDILSRLDKVEAEVQIDRLITGRLQSLQTYVTQQLIRAAEIRASANLAATKMSECVLGQSKRVDFCGKGYHLMSFPQSAPHGVVFLHVTYVPAQEKNFTTAPAICHDGKAHFPREGVFVSNGTHWFVTQRNFYEPQIITTDNTFVSGNCDVVIGIVNNTVYDPLQPELDSFKEELDKYFKNHTSPDVDLGDISGINASVVNIQKEIDRLNEVAKNLNESLIDLQELGKYEQYIKWPWYIWLGFIAGLIAIVMVTIMLCCMTSCCSCLKGCCSCGSCCKFDEDDSEPVLKGVKLHYTHHHHH

SEQ ID NO: 50 - DNA, 2883 bp, synthetic construct
  misc_feature 1..2883: note = RECOMBINANT SPIKE PROTEIN
  source 1..2883: mol_type = other DNA
atgttcgtcttcctggtgctgctgcccctggtgtccagcatcactaacctgtgccccttcggagaggtcttcaacgccacccgcttcgcttccgtgtacgcctggaacaggaagagaatctcaaactgcgtcgctgactactccgtgctgtacaactcagcctccttcagcaccttcaagtgctacggcgtgtcaccaactaagctgaacgacctgtgcttcaccaacgtctacgccgactccttcgtgatcaggggagacgaggtcagacagatcgctcctggccagactggaaagatcgccgactacaactacaagctgcccgacgacttcaccggttgcgtcatcgcttggaacagcaacaacctggactctaaagtgggtggcaactacaactacctgtaccgcctgttccgtaagtcaaacctgaagccattcgagagggacatcagcactgaaatctaccaggccggatctaccccttgcaacggtgtcgagggcttcaactgctacttccccctgcagtcctacggtttccagccaactaacggtgtgggctaccagccttacagagtggtcgtgctgagcttcgaactgctccacgctcctgctactgtgtgcggtccaaagaagtctaccaacctggtcaagaacaagtgcgtgaacttcaacttcaacggcctgaccggaactggtgtcctgaccgagagcaacaagaagttcctgcccttccagcagttcggaagggacatcgctgacaccactgacgctgtgcgcgaccctcagaccctggaaatcctggacatcactccatgctcattcggaggtgtctccgtgatcacccctggcaccaacacttctaaccaggtcgctgtgctgtaccaggacgtcaactgcaccgaggtccctgtggccatccacgctgaccagctgacccccacttggcgcgtgtactccaccggcagcaacgtgttccagactcgtgctggttgcctgatcggcgccgagcacgtgaacaacagctacgaatgcgacatccccatcggcgctggaatctgcgcctcttaccagacccagactaacagcccacgcagggctcgctctgtggcctctcagtcaatcatcgcttacaccatgtcactgggcgctgaaaactccgtggcctactctaacaactcaatcgccatccccaccaacttcactatcagcgtgaccactgagatcctgccagtcagcatgaccaagacttctgtggactgcactatgtacatctgcggagacagcaccgaatgctctaacctgctgctgcagtacggctctttctgcacccagctgaaccgtgctctgactggaatcgccgtggagcaggacaagaacactcaggaagtcttcgctcaggtgaagcaaatctacaagaccccacctatcaaggacttcggcggattcaacttctcccagatcctgcctgacccctccaagccaagcaagcgctctttcatcgaggacctgctgttcaacaaggtcactctggccgacgctggattcatcaagcagtacggagactgcctgggtgacatcgccgctcgtgacctgatctgcgctcagaagttcaacggtctgaccgtgctgcccccactgctgactgacgaaatgatcgcccagtacactagcgccctgctggctggaaccatcacttctggttggaccttcggtgctggcgccgctctgcagatccctttcgctatgcagatggcctaccgtttcaacggaatcggtgtcacccagaacgtgctgtacgagaaccagaagctgatcgctaaccagttcaactcagccatcggaaagatccaggacagcctgagctctactgcctctgctctgggcaagctgcaggacgtcgtgaaccagaacgcccaggctctgaacaccctggtcaagcagctgtcatccaacttcggtgctatcagctctgtgctgaacgacatcctgtcccgcctggacaaggtcgaggccgaagtgcagatcgaccgcctgatcactggccgtctgcagtcactgcagacctacgtgactcagcagctgatcagggccgctgaaatcagagcctccgctaacctggccgctaccaagatgagcgagtgcgtcctgggtcaatctaagcgtgtggacttctgcggcaagggataccacctgatgtcattccctcagtctgctccccacggtgtggtgttcctgcacgtcacctacgtgccagcccaggagaagaacttcaccactgcccctgctatctgccacgacggcaaggctcacttccccagggaaggtgtcttcgtgagcaacggcacccactggttcgtcactcagagaaacttctacgagccacagatcatcaccactgacaacactttcgtgtctggaaactgcgacgtggtcatcggtatcgtcaacaacaccgtgtacgaccccctgcagccagagctggactcattcaaggaggaactggacaagtacttcaagaaccacacctcccctgacgtcgacctgggcgacatctcaggaatcaacgcttccgtcgtgaacatccagaaggagatcgaccgcctgaacgaagtggccaagaacctgaacgaaagcctgatcgacctgcaggagctgggcaagtacgaacagtacatcaagtggccttggtacatctggctgggtttcatcgctggcctcatcgctatcgtgatggtgaccatcatgctgtgctgcatgacttcatgctgctcctgcctgaagggctgctgcagctgcggatcttgctgcaagttcgacgaggacgactctgaacccgtcctgaagggcgtgaagctgcactacacccaccaccaccaccaccac

SEQ ID NO: 51 - protein, 947 aa, synthetic construct
  REGION 1..947: note = RECOMBINANT SPIKE PROTEIN
ITNLCPFGEVFNATRFASVYAWNRKRISNCVADYSVLYNSASFSTFKCYGVSPTKLNDLCFTNVYADSFVIRGDEVRQIAPGQTGKIADYNYKLPDDFTGCVIAWNSNNLDSKVGGNYNYLYRLFRKSNLKPFERDISTEIYQAGSTPCNGVEGFNCYFPLQSYGFQPTNGVGYQPYRVVVLSFELLHAPATVCGPKKSTNLVKNKCVNFNFNGLTGTGVLTESNKKFLPFQQFGRDIADTTDAVRDPQTLEILDITPCSFGGVSVITPGTNTSNQVAVLYQDVNCTEVPVAIHADQLTPTWRVYSTGSNVFQTRAGCLIGAEHVNNSYECDIPIGAGICASYQTQTNSPRRARSVASQSIIAYTMSLGAENSVAYSNNSIAIPTNFTISVTTEILPVSMTKTSVDCTMYICGDSTECSNLLLQYGSFCTQLNRALTGIAVEQDKNTQEVFAQVKQIYKTPPIKDFGGFNFSQILPDPSKPSKRSFIEDLLFNKVTLADAGFIKQYGDCLGDIAARDLICAQKFNGLTVLPPLLTDEMIAQYTSALLAGTITSGWTFGAGAALQIPFAMQMAYRFNGIGVTQNVLYENQKLIANQFNSAIGKIQDSLSSTASALGKLQDVVNQNAQALNTLVKQLSSNFGAISSVLNDILSRLDKVEAEVQIDRLITGRLQSLQTYVTQQLIRAAEIRASANLAATKMSECVLGQSKRVDFCGKGYHLMSFPQSAPHGVVFLHVTYVPAQEKNFTTAPAICHDGKAHFPREGVFVSNGTHWFVTQRNFYEPQIITTDNTFVSGNCDVVIGIVNNTVYDPLQPELDSFKEELDKYFKNHTSPDVDLGDISGINASVVNIQKEIDRLNEVAKNLNESLIDLQELGKYEQYIKWPWYIWLGFIAGLIAIVMVTIMLCCMTSCCSCLKGCCSCGSCCKFDEDDSEPVLKGVKLHYTHHHHH

SEQ ID NO: 52 - protein, 901 aa, synthetic construct
  REGION 1..901: note = RECOMBINANT SPIKE PROTEIN
MFVFLVLLPLVSSITNLCPFGEVFNATRFASVYAWNRKRISNCVADYSVLYNSASFSTFKCYGVSPTKLNDLCFTNVYADSFVIRGDEVRQIAPGQTGKIADYNYKLPDDFTGCVIAWNSNNLDSKVGGNYNYLYRLFRKSNLKPFERDISTEIYQAGSTPCNGVEGFNCYFPLQSYGFQPTNGVGYQPYRVVVLSFELLHAPATVCGPKKSTNLVKNKCVNFNFNGLTGTGVLTESNKKFLPFQQFGRDIADTTDAVRDPQTLEILDITPCSFGGVSVITPGTNTSNQVAVLYQDVNCTEVPVAIHADQLTPTWRVYSTGSNVFQTRAGCLIGAEHVNNSYECDIPIGAGICASYQTQTNSPRRARSVASQSIIAYTMSLGAENSVAYSNNSIAIPTNFTISVTTEILPVSMTKTSVDCTMYICGDSTECSNLLLQYGSFCTQLNRALTGIAVEQDKNTQEVFAQVKQIYKTPPIKDFGGFNFSQILPDPSKPSKRSFIEDLLFNKVTLADAGFIKQYGDCLGDIAARDLICAQKFNGLTVLPPLLTDEMIAQYTSALLAGTITSGWTFGAGAALQIPFAMQMAYRFNGIGVTQNVLYENQKLIANQFNSAIGKIQDSLSSTASALGKLQDVVNQNAQALNTLVKQLSSNFGAISSVLNDILSRLDKVEAEVQIDRLITGRLQSLQTYVTQQLIRAAEIRASANLAATKMSECVLGQSKRVDFCGKGYHLMSFPQSAPHGVVFLHVTYVPAQEKNFTTAPAICHDGKAHFPREGVFVSNGTHWFVTQRNFYEPQIITTDNTFVSGNCDVVIGIVNNTVYDPLQPELDSFKEELDKYFKNHTSPDVDLGDISGINASVVNIQKEIDRLNEVAKNLNESLIDLQELGKYEQYIKWPHHHHHH

SEQ ID NO: 53 - DNA, 2706 bp, synthetic construct
  misc_feature 1..2706: note = RECOMBINANT SPIKE PROTEIN
  source 1..2706: mol_type = other DNA
atgttcgtcttcctggtgctgctgcccctggtgtccagcatcactaacctgtgccccttcggagaggtcttcaacgccacccgcttcgcttccgtgtacgcctggaacaggaagagaatctcaaactgcgtcgctgactactccgtgctgtacaactcagcctccttcagcaccttcaagtgctacggcgtgtcaccaactaagctgaacgacctgtgcttcaccaacgtctacgccgactccttcgtgatcaggggagacgaggtcagacagatcgctcctggccagactggaaagatcgccgactacaactacaagctgcccgacgacttcaccggttgcgtcatcgcttggaacagcaacaacctggactctaaagtgggtggcaactacaactacctgtaccgcctgttccgtaagtcaaacctgaagccattcgagagggacatcagcactgaaatctaccaggccggatctaccccttgcaacggtgtcgagggcttcaactgctacttccccctgcagtcctacggtttccagccaactaacggtgtgggctaccagccttacagagtggtcgtgctgagcttcgaactgctccacgctcctgctactgtgtgcggtccaaagaagtctaccaacctggtcaagaacaagtgcgtgaacttcaacttcaacggcctgaccggaactggtgtcctgaccgagagcaacaagaagttcctgcccttccagcagttcggaagggacatcgctgacaccactgacgctgtgcgcgaccctcagaccctggaaatcctggacatcactccatgctcattcggaggtgtctccgtgatcacccctggcaccaacacttctaaccaggtcgctgtgctgtaccaggacgtcaactgcaccgaggtccctgtggccatccacgctgaccagctgacccccacttggcgcgtgtactccaccggcagcaacgtgttccagactcgtgctggttgcctgatcggcgccgagcacgtgaacaacagctacgaatgcgacatccccatcggcgctggaatctgcgcctcttaccagacccagactaacagcccacgcagggctcgctctgtggcctctcagtcaatcatcgcttacaccatgtcactgggcgctgaaaactccgtggcctactctaacaactcaatcgccatccccaccaacttcactatcagcgtgaccactgagatcctgccagtcagcatgaccaagacttctgtggactgcactatgtacatctgcggagacagcaccgaatgctctaacctgctgctgcagtacggctctttctgcacccagctgaaccgtgctctgactggaatcgccgtggagcaggacaagaacactcaggaagtcttcgctcaggtgaagcaaatctacaagaccccacctatcaaggacttcggcggattcaacttctcccagatcctgcctgacccctccaagccaagcaagcgctctttcatcgaggacctgctgttcaacaaggtcactctggccgacgctggattcatcaagcagtacggagactgcctgggtgacatcgccgctcgtgacctgatctgcgctcagaagttcaacggtctgaccgtgctgcccccactgctgactgacgaaatgatcgcccagtacactagcgccctgctggctggaaccatcacttctggttggaccttcggtgctggcgccgctctgcagatccctttcgctatgcagatggcctaccgtttcaacggaatcggtgtcacccagaacgtgctgtacgagaaccagaagctgatcgctaaccagttcaactcagccatcggaaagatccaggacagcctgagctctactgcctctgctctgggcaagctgcaggacgtcgtgaaccagaacgcccaggctctgaacaccctggtcaagcagctgtcatccaacttcggtgctatcagctctgtgctgaacgacatcctgtcccgcctggacaaggtcgaggccgaagtgcagatcgaccgcctgatcactggccgtctgcagtcactgcagacctacgtgactcagcagctgatcagggccgctgaaatcagagcctccgctaacctggccgctaccaagatgagcgagtgcgtcctgggtcaatctaagcgtgtggacttctgcggcaagggataccacctgatgtcattccctcagtctgctccccacggtgtggtgttcctgcacgtcacctacgtgccagcccaggagaagaacttcaccactgcccctgctatctgccacgacggcaaggctcacttccccagggaaggtgtcttcgtgagcaacggcacccactggttcgtcactcagagaaacttctacgagccacagatcatcaccactgacaacactttcgtgtctggaaactgcgacgtggtcatcggtatcgtcaacaacaccgtgtacgaccccctgcagccagagctggactcattcaaggaggaactggacaagtacttcaagaaccacacctcccctgacgtcgacctgggcgacatctcaggaatcaacgcttccgtcgtgaacatccagaaggagatcgaccgcctgaacgaagtggccaagaacctgaacgaaagcctgatcgacctgcaggagctgggcaagtacgaacagtacatcaagtggcctcaccaccaccaccaccaccac

SEQ ID NO: 54 - protein, 888 aa, synthetic construct
  REGION 1..888: note = RECOMBINANT SPIKE PROTEIN
ITNLCPFGEVFNATRFASVYAWNRKRISNCVADYSVLYNSASFSTFKCYGVSPTKLNDLCFTNVYADSFVIRGDEVRQIAPGQTGKIADYNYKLPDDFTGCVIAWNSNNLDSKVGGNYNYLYRLFRKSNLKPFERDISTEIYQAGSTPCNGVEGFNCYFPLQSYGFQPTNGVGYQPYRVVVLSFELLHAPATVCGPKKSTNLVKNKCVNFNFNGLTGTGVLTESNKKFLPFQQFGRDIADTTDAVRDPQTLEILDITPCSFGGVSVITPGTNTSNQVAVLYQDVNCTEVPVAIHADQLTPTWRVYSTGSNVFQTRAGCLIGAEHVNNSYECDIPIGAGICASYQTQTNSPRRARSVASQSIIAYTMSLGAENSVAYSNNSIAIPTNFTISVTTEILPVSMTKTSVDCTMYICGDSTECSNLLLQYGSFCTQLNRALTGIAVEQDKNTQEVFAQVKQIYKTPPIKDFGGFNFSQILPDPSKPSKRSFIEDLLFNKVTLADAGFIKQYGDCLGDIAARDLICAQKFNGLTVLPPLLTDEMIAQYTSALLAGTITSGWTFGAGAALQIPFAMQMAYRFNGIGVTQNVLYENQKLIANQFNSAIGKIQDSLSSTASALGKLQDVVNQNAQALNTLVKQLSSNFGAISSVLNDILSRLDKVEAEVQIDRLITGRLQSLQTYVTQQLIRAAEIRASANLAATKMSECVLGQSKRVDFCGKGYHLMSFPQSAPHGVVFLHVTYVPAQEKNFTTAPAICHDGKAHFPREGVFVSNGTHWFVTQRNFYEPQIITTDNTFVSGNCDVVIGIVNNTVYDPLQPELDSFKEELDKYFKNHTSPDVDLGDISGINASVVNIQKEIDRLNEVAKNLNESLIDLQELGKYEQYIKWPHHHHHH

SEQ ID NO: 55 - DNA, 3819 bp, synthetic construct
  misc_feature 1..3819: note = RECOMBINANT SPIKE PROTEIN
  source 1..3819: mol_type = other DNA
atgttcgtcttcctggtgctgctgcccctggtgtccagccagtgcgtgaacctgaccactaggactcagctgcctcccgcttacaccaactcattcactcgcggtgtgtactaccctgacaaggtcttccgttcttcagtgctgcactcaactcaggacctgttcctgcccttcttctccaacgtcacctggttccacgccatccacgtgtccggcaccaacggcactaagcgcttcgacaacccagtgctgcctttcaacgacggtgtctacttcgcttcaaccgagaagtccaacatcatccgtggatggatcttcggcaccactctggacagcaagactcagtctctgctgatcgtcaacaacgccaccaacgtggtcatcaaggtctgcgaattccagttctgcaacgacccattcctgggcgtctactaccacaagaacaacaagtcatggatggagtccgaattccgcgtctactccagcgctaacaactgcactttcgagtacgtgtcccagcctttcctgatggacctggaaggaaagcagggtaacttcaagaacctgagggagttcgtgttcaagaacatcgacggatacttcaagatttacagcaagcacaccccaatcaacctggtgcgcgacctgcctcagggtttctctgctctggagccactggtggacctgcctatcggcatcaacatcacccgcttccagactctgctggctctgcaccgttcctacctgactccaggcgactcatcttctggatggactgctggagctgctgcttactacgtgggctacctgcagcctcgcaccttcctgctgaagtacaacgaaaacggaaccatcactgacgccgtcgactgcgctctggaccctctgtcagaaaccaagtgcactctgaagtccttcaccgtggagaagggcatctaccagacttcaaacttcagggtgcagcccaccgaatccatcgtcagattccctaacatcactaacctgtgccccttcggagaggtcttcaacgccacccgcttcgcttccgtgtacgcctggaacaggaagagaatctcaaactgcgtcgctgactactccgtgctgtacaactcagcctccttcagcaccttcaagtgctacggcgtgtcaccaactaagctgaacgacctgtgcttcaccaacgtctacgccgactccttcgtgatcaggggagacgaggtcagacagatcgctcctggccagactggaaagatcgccgactacaactacaagctgcccgacgacttcaccggttgcgtcatcgcttggaacagcaacaacctggactctaaagtgggtggcaactacaactacctgtaccgcctgttccgtaagtcaaacctgaagccattcgagagggacatcagcactgaaatctaccaggccggatctaccccttgcaacggtgtcgagggcttcaactgctacttccccctgcagtcctacggtttccagccaactaacggtgtgggctaccagccttacagagtggtcgtgctgagcttcgaactgctccacgctcctgctactgtgtgcggtccaaagaagtctaccaacctggtcaagaacaagtgcgtgaacttcaacttcaacggcctgaccggaactggtgtcctgaccgagagcaacaagaagttcctgcccttccagcagttcggaagggacatcgctgacaccactgacgctgtgcgcgaccctcagaccctggaaatcctggacatcactccatgctcattcggaggtgtctccgtgatcacccctggcaccaacacttctaaccaggtcgctgtgctgtaccaggacgtcaactgcaccgaggtccctgtggccatccacgctgaccagctgacccccacttggcgcgtgtactccaccggcagcaacgtgttccagactcgtgctggttgcctgatcggcgccgagcacgtgaacaacagctacgaatgcgacatccccatcggcgctggaatctgcgcctcttaccagacccagactaacagcccacagcaggctcagtctgtggcctctcagtcaatcatcgcttacaccatgtcactgggcgctgaaaactccgtggcctactctaacaactcaatcgccatccccaccaacttcactatcagcgtgaccactgagatcctgccagtcagcatgaccaagacttctgtggactgcactatgtacatctgcggagacagcaccgaatgctctaacctgctgctgcagtacggctctttctgcacccagctgaaccgtgctctgactggaatcgccgtggagcaggacaagaacactcaggaagtcttcgctcaggtgaagcaaatctacaagaccccacctatcaaggacttcggcggattcaacttctcccagatcctgcctgacccctccaagccaagcaagcgctctttcatcgaggacctgctgttcaacaaggtcactctggccgacgctggattcatcaagcagtacggagactgcctgggtgacatcgccgctcgtgacctgatctgcgctcagaagttcaacggtctgaccgtgctgcccccactgctgactgacgaaatgatcgcccagtacactagcgccctgctggctggaaccatcacttctggttggaccttcggtgctggcgccgctctgcagatccctttcgctatgcagatggcctaccgtttcaacggaatcggtgtcacccagaacgtgctgtacgagaaccagaagctgatcgctaaccagttcaactcagccatcggaaagatccaggacagcctgagctctactgcctctgctctgggcaagctgcaggacgtcgtgaaccagaacgcccaggctctgaacaccctggtcaagcagctgtcatccaacttcggtgctatcagctctgtgctgaacgacatcctgtcccgcctggacaaggtcgaggccgaagtgcagatcgaccgcctgatcactggccgtctgcagtcactgcagacctacgtgactcagcagctgatcagggccgctgaaatcagagcctccgctaacctggccgctaccaagatgagcgagtgcgtcctgggtcaatctaagcgtgtggacttctgcggcaagggataccacctgatgtcattccctcagtctgctccccacggtgtggtgttcctgcacgtcacctacgtgccagcccaggagaagaacttcaccactgcccctgctatctgccacgacggcaaggctcacttccccagggaaggtgtcttcgtgagcaacggcacccactggttcgtcactcagagaaacttctacgagccacagatcatcaccactgacaacactttcgtgtctggaaactgcgacgtggtcatcggtatcgtcaacaacaccgtgtacgaccccctgcagccagagctggactcattcaaggaggaactggacaagtacttcaagaaccacacctcccctgacgtcgacctgggcgacatctcaggaatcaacgcttccgtcgtgaacatccagaaggagatcgaccgcctgaacgaagtggccaagaacctgaacgaaagcctgatcgacctgcaggagctgggcaagtacgaacagtacatcaagtggccttggtacatctggctgggtttcatcgctggcctcatcgctatcgtgatggtgaccatcatgctgtgctgcatgacttcatgctgctcctgcctgaagggctgctgcagctgcggatcttgctgcaagttcgacgaggacgactctgaacccgtcctgaagggcgtgaagctgcactacacc

SEQ ID NO: 56 - protein, 1279 aa, synthetic construct
  REGION 1..1279: note = RECOMBINANT SPIKE PROTEIN
MFVFLVLLPLVSSQCVNLTTRTQLPPAYTNSFTRGVYYPDKVFRSSVLHSTQDLFLPFFSNVTWFHAIHVSGTNGTKRFDNPVLPFNDGVYFASTEKSNIIRGWIFGTTLDSKTQSLLIVNNATNVVIKVCEFQFCNDPFLGVYYHKNNKSWMESEFRVYSSANNCTFEYVSQPFLMDLEGKQGNFKNLREFVFKNIDGYFKIYSKHTPINLVRDLPQGFSALEPLVDLPIGINITRFQTLLALHRSYLTPGDSSSGWTAGAAAYYVGYLQPRTFLLKYNENGTITDAVDCALDPLSETKCTLKSFTVEKGIYQTSNFRVQPTESIVRFPNITNLCPFGEVFNATRFASVYAWNRKRISNCVADYSVLYNSASFSTFKCYGVSPTKLNDLCFTNVYADSFVIRGDEVRQIAPGQTGKIADYNYKLPDDFTGCVIAWNSNNLDSKVGGNYNYLYRLFRKSNLKPFERDISTEIYQAGSTPCNGVEGFNCYFPLQSYGFQPTNGVGYQPYRVVVLSFELLHAPATVCGPKKSTNLVKNKCVNFNFNGLTGTGVLTESNKKFLPFQQFGRDIADTTDAVRDPQTLEILDITPCSFGGVSVITPGTNTSNQVAVLYQDVNCTEVPVAIHADQLTPTWRVYSTGSNVFQTRAGCLIGAEHVNNSYECDIPIGAGICASYQTQTNSPQQAQSVASQSIIAYTMSLGAENSVAYSNNSIAIPTNFTISVTTEILPVSMTKTSVDCTMYICGDSTECSNLLLQYGSFCTQLNRALTGIAVEQDKNTQEVFAQVKQIYKTPPIKDFGGFNFSQILPDPSKPSKRSFIEDLLFNKVTLADAGFIKQYGDCLGDIAARDLICAQKFNGLTVLPPLLTDEMIAQYTSALLAGTITSGWTFGAGAALQIPFAMQMAYRFNGIGVTQNVLYENQKLIANQFNSAIGKIQDSLSSTASALGKLQDVVNQNAQALNTLVKQLSSNFGAISSVLNDILSRLDKVEAEVQIDRLITGRLQSLQTYVTQQLIRAAEIRASANLAATKMSECVLGQSKRVDFCGKGYHLMSFPQSAPHGVVFLHVTYVPAQEKNFTTAPAICHDGKAHFPREGVFVSNGTHWFVTQRNFYEPQIITTDNTFVSGNCDVVIGIVNNTVYDPLQPELDSFKEELDKYFKNHTSPDVDLGDISGINASVVNIQKEIDRLNEVAKNLNESLIDLQELGKYEQYIKWPWYIWLGFIAGLIAIVMVTIMLCCMTSCCSCLKGCCSCGSCCKFDEDDSEPVLKGVKLHYTHHHHHH

SEQ ID NO: 57 - DNA, 3837 bp, synthetic construct
  misc_feature 1..3837: note = RECOMBINANT SPIKE PROTEIN
  source 1..3837: mol_type = other DNA
atgttcgtcttcctggtgctgctgcccctggtgtccagccagtgcgtgaacctgaccactaggactcagctgcctcccgcttacaccaactcattcactcgcggtgtgtactaccctgacaaggtcttccgttcttcagtgctgcactcaactcaggacctgttcctgcccttcttctccaacgtcacctggttccacgccatccacgtgtccggcaccaacggcactaagcgcttcgacaacccagtgctgcctttcaacgacggtgtctacttcgcttcaaccgagaagtccaacatcatccgtggatggatcttcggcaccactctggacagcaagactcagtctctgctgatcgtcaacaacgccaccaacgtggtcatcaaggtctgcgaattccagttctgcaacgacccattcctgggcgtctactaccacaagaacaacaagtcatggatggagtccgaattccgcgtctactccagcgctaacaactgcactttcgagtacgtgtcccagcctttcctgatggacctggaaggaaagcagggtaacttcaagaacctgagggagttcgtgttcaagaacatcgacggatacttcaagatttacagcaagcacaccccaatcaacctggtgcgcgacctgcctcagggtttctctgctctggagccactggtggacctgcctatcggcatcaacatcacccgcttccagactctgctggctctgcaccgttcctacctgactccaggcgactcatcttctggatggactgctggagctgctgcttactacgtgggctacctgcagcctcgcaccttcctgctgaagtacaacgaaaacggaaccatcactgacgccgtcgactgcgctctggaccctctgtcagaaaccaagtgcactctgaagtccttcaccgtggagaagggcatctaccagacttcaaacttcagggtgcagcccaccgaatccatcgtcagattccctaacatcactaacctgtgccccttcggagaggtcttcaacgccacccgcttcgcttccgtgtacgcctggaacaggaagagaatctcaaactgcgtcgctgactactccgtgctgtacaactcagcctccttcagcaccttcaagtgctacggcgtgtcaccaactaagctgaacgacctgtgcttcaccaacgtctacgccgactccttcgtgatcaggggagacgaggtcagacagatcgctcctggccagactggaaagatcgccgactacaactacaagctgcccgacgacttcaccggttgcgtcatcgcttggaacagcaacaacctggactctaaagtgggtggcaactacaactacctgtaccgcctgttccgtaagtcaaacctgaagccattcgagagggacatcagcactgaaatctaccaggccggatctaccccttgcaacggtgtcgagggcttcaactgctacttccccctgcagtcctacggtttccagccaactaacggtgtgggctaccagccttacagagtggtcgtgctgagcttcgaactgctccacgctcctgctactgtgtgcggtccaaagaagtctaccaacctggtcaagaacaagtgcgtgaacttcaacttcaacggcctgaccggaactggtgtcctgaccgagagcaacaagaagttcctgcccttccagcagttcggaagggacatcgctgacaccactgacgctgtgcgcgaccctcagaccctggaaatcctggacatcactccatgctcattcggaggtgtctccgtgatcacccctggcaccaacacttctaaccaggtcgctgtgctgtaccaggacgtcaactgcaccgaggtccctgtggccatccacgctgaccagctgacccccacttggcgcgtgtactccaccggcagcaacgtgttccagactcgtgctggttgcctgatcggcgccgagcacgtgaacaacagctacgaatgcgacatccccatcggcgctggaatctgcgcctcttaccagacccagactaacagcccacagcaggctcagtctgtggcctctcagtcaatcatcgcttacaccatgtcactgggcgctgaaaactccgtggcctactctaacaactcaatcgccatccccaccaacttcactatcagcgtgaccactgagatcctgccagtcagcatgaccaagacttctgtggactgcactatgtacatctgcggagacagcaccgaatgctctaacctgctgctgcagtacggctctttctgcacccagctgaaccgtgctctgactggaatcgccgtggagcaggacaagaacactcaggaagtcttcgctcaggtgaagcaaatctacaagaccccacctatcaaggacttcggcggattcaacttctcccagatcctgcctgacccctccaagccaagcaagcgctctttcatcgaggacctgctgttcaacaaggtcactctggccgacgctggattcatcaagcagtacggagactgcctgggtgacatcgccgctcgtgacctgatctgcgctcagaagttcaacggtctgaccgtgctgcccccactgctgactgacgaaatgatcgcccagtacactagcgccctgctggctggaaccatcacttctggttggaccttcggtgctggcgccgctctgcagatccctttcgctatgcagatggcctaccgtttcaacggaatcggtgtcacccagaacgtgctgtacgagaaccagaagctgatcgctaaccagttcaactcagccatcggaaagatccaggacagcctgagctctactgcctctgctctgggcaagctgcaggacgtcgtgaaccagaacgcccaggctctgaacaccctggtcaagcagctgtcatccaacttcggtgctatcagctctgtgctgaacgacatcctgtcccgcctggacaaggtcgaggccgaagtgcagatcgaccgcctgatcactggccgtctgcagtcactgcagacctacgtgactcagcagctgatcagggccgctgaaatcagagcctccgctaacctggccgctaccaagatgagcgagtgcgtcctgggtcaatctaagcgtgtggacttctgcggcaagggataccacctgatgtcattccctcagtctgctccccacggtgtggtgttcctgcacgtcacctacgtgccagcccaggagaagaacttcaccactgcccctgctatctgccacgacggcaaggctcacttccccagggaaggtgtcttcgtgagcaacggcacccactggttcgtcactcagagaaacttctacgagccacagatcatcaccactgacaacactttcgtgtctggaaactgcgacgtggtcatcggtatcgtcaacaacaccgtgtacgaccccctgcagccagagctggactcattcaaggaggaactggacaagtacttcaagaaccacacctcccctgacgtcgacctgggcgacatctcaggaatcaacgcttccgtcgtgaacatccagaaggagatcgaccgcctgaacgaagtggccaagaacctgaacgaaagcctgatcgacctgcaggagctgggcaagtacgaacagtacatcaagtggccttggtacatctggctgggtttcatcgctggcctcatcgctatcgtgatggtgaccatcatgctgtgctgcatgacttcatgctgctcctgcctgaagggctgctgcagctgcggatcttgctgcaagttcgacgaggacgactctgaacccgtcctgaagggcgtgaagctgcactacacccaccaccaccaccaccac

SEQ ID NO: 58 - protein, 1266 aa, synthetic construct
  REGION 1..1266: note = RECOMBINANT SPIKE PROTEIN
QCVNLTTRTQLPPAYTNSFTRGVYYPDKVFRSSVLHSTQDLFLPFFSNVTWFHAIHVSGTNGTKRFDNPVLPFNDGVYFASTEKSNIIRGWIFGTTLDSKTQSLLIVNNATNVVIKVCEFQFCNDPFLGVYYHKNNKSWMESEFRVYSSANNCTFEYVSQPFLMDLEGKQGNFKNLREFVFKNIDGYFKIYSKHTPINLVRDLPQGFSALEPLVDLPIGINITRFQTLLALHRSYLTPGDSSSGWTAGAAAYYVGYLQPRTFLLKYNENGTITDAVDCALDPLSETKCTLKSFTVEKGIYQTSNFRVQPTESIVRFPNITNLCPFGEVFNATRFASVYAWNRKRISNCVADYSVLYNSASFSTFKCYGVSPTKLNDLCFTNVYADSFVIRGDEVRQIAPGQTGKIADYNYKLPDDFTGCVIAWNSNNLDSKVGGNYNYLYRLFRKSNLKPFERDISTEIYQAGSTPCNGVEGFNCYFPLQSYGFQPTNGVGYQPYRVVVLSFELLHAPATVCGPKKSTNLVKNKCVNFNFNGLTGTGVLTESNKKFLPFQQFGRDIADTTDAVRDPQTLEILDITPCSFGGVSVITPGTNTSNQVAVLYQDVNCTEVPVAIHADQLTPTWRVYSTGSNVFQTRAGCLIGAEHVNNSYECDIPIGAGICASYQTQTNSPQQAQSVASQSIIAYTMSLGAENSVAYSNNSIAIPTNFTISVTTEILPVSMTKTSVDCTMYICGDSTECSNLLLQYGSFCTQLNRALTGIAVEQDKNTQEVFAQVKQIYKTPPIKDFGGFNFSQILPDPSKPSKRSFIEDLLFNKVTLADAGFIKQYGDCLGDIAARDLICAQKFNGLTVLPPLLTDEMIAQYTSALLAGTITSGWTFGAGAALQIPFAMQMAYRFNGIGVTQNVLYENQKLIANQFNSAIGKIQDSLSSTASALGKLQDVVNQNAQALNTLVKQLSSNFGAISSVLNDILSRLDKVEAEVQIDRLITGRLQSLQTYVTQQLIRAAEIRASANLAATKMSECVLGQSKRVDFCGKGYHLMSFPQSAPHGVVFLHVTYVPAQEKNFTTAPAICHDGKAHFPREGVFVSNGTHWFVTQRNFYEPQIITTDNTFVSGNCDVVIGIVNNTVYDPLQPELDSFKEELDKYFKNHTSPDVDLGDISGINASVVNIQKEIDRLNEVAKNLNESLIDLQELGKYEQYIKWPWYIWLGFIAGLIAIVMVTIMLCCMTSCCSCLKGCCSCGSCCKFDEDDSEPVLKGVKLHYTHHHHHH

SEQ ID NO: 59 - protein, 1219 aa, synthetic construct
  REGION 1..1219: note = RECOMBINANT SPIKE PROTEIN
MFVFLVLLPLVSSQCVNLTTRTQLPPAYTNSFTRGVYYPDKVFRSSVLHSTQDLFLPFFSNVTWFHAIHVSGTNGTKRFDNPVLPFNDGVYFASTEKSNIIRGWIFGTTLDSKTQSLLIVNNATNVVIKVCEFQFCNDPFLGVYYHKNNKSWMESEFRVYSSANNCTFEYVSQPFLMDLEGKQGNFKNLREFVFKNIDGYFKIYSKHTPINLVRDLPQGFSALEPLVDLPIGINITRFQTLLALHRSYLTPGDSSSGWTAGAAAYYVGYLQPRTFLLKYNENGTITDAVDCALDPLSETKCTLKSFTVEKGIYQTSNFRVQPTESIVRFPNITNLCPFGEVFNATRFASVYAWNRKRISNCVADYSVLYNSASFSTFKCYGVSPTKLNDLCFTNVYADSFVIRGDEVRQIAPGQTGKIADYNYKLPDDFTGCVIAWNSNNLDSKVGGNYNYLYRLFRKSNLKPFERDISTEIYQAGSTPCNGVEGFNCYFPLQSYGFQPTNGVGYQPYRVVVLSFELLHAPATVCGPKKSTNLVKNKCVNFNFNGLTGTGVLTESNKKFLPFQQFGRDIADTTDAVRDPQTLEILDITPCSFGGVSVITPGTNTSNQVAVLYQDVNCTEVPVAIHADQLTPTWRVYSTGSNVFQTRAGCLIGAEHVNNSYECDIPIGAGICASYQTQTNSPQQAQSVASQSIIAYTMSLGAENSVAYSNNSIAIPTNFTISVTTEILPVSMTKTSVDCTMYICGDSTECSNLLLQYGSFCTQLNRALTGIAVEQDKNTQEVFAQVKQIYKTPPIKDFGGFNFSQILPDPSKPSKRSFIEDLLFNKVTLADAGFIKQYGDCLGDIAARDLICAQKFNGLTVLPPLLTDEMIAQYTSALLAGTITSGWTFGAGAALQIPFAMQMAYRFNGIGVTQNVLYENQKLIANQFNSAIGKIQDSLSSTASALGKLQDVVNQNAQALNTLVKQLSSNFGAISSVLNDILSRLDKVEAEVQIDRLITGRLQSLQTYVTQQLIRAAEIRASANLAATKMSECVLGQSKRVDFCGKGYHLMSFPQSAPHGVVFLHVTYVPAQEKNFTTAPAICHDGKAHFPREGVFVSNGTHWFVTQRNFYEPQIITTDNTFVSGNCDVVIGIVNNTVYDPLQPELDSFKEELDKYFKNHTSPDVDLGDISGINASVVNIQKEIDRLNEVAKNLNESLIDLQELGKYEQYIKWPHHHHHH

SEQ ID NO: 60 - DNA, 3657 bp, synthetic construct
  misc_feature 1..3657: note = RECOMBINANT SPIKE PROTEIN
  source 1..3657: mol_type = other DNA
atgttcgtcttcctggtgctgctgcccctggtgtccagccagtgcgtgaacctgaccactaggactcagctgcctcccgcttacaccaactcattcactcgcggtgtgtactaccctgacaaggtcttccgttcttcagtgctgcactcaactcaggacctgttcctgcccttcttctccaacgtcacctggttccacgccatccacgtgtccggcaccaacggcactaagcgcttcgacaacccagtgctgcctttcaacgacggtgtctacttcgcttcaaccgagaagtccaacatcatccgtggatggatcttcggcaccactctggacagcaagactcagtctctgctgatcgtcaacaacgccaccaacgtggtcatcaaggtctgcgaattccagttctgcaacgacccattcctgggcgtctactaccacaagaacaacaagtcatggatggagtccgaattccgcgtctactccagcgctaacaactgcactttcgagtacgtgtcccagcctttcctgatggacctggaaggaaagcagggtaacttcaagaacctgagggagttcgtgttcaagaacatcgacggatacttcaagatttacagcaagcacaccccaatcaacctggtgcgcgacctgcctcagggtttctctgctctggagccactggtggacctgcctatcggcatcaacatcacccgcttccagactctgctggctctgcaccgttcctacctgactccaggcgactcatcttctggatggactgctggagctgctgcttactacgtgggctacctgcagcctcgcaccttcctgctgaagtacaacgaaaacggaaccatcactgacgccgtcgactgcgctctggaccctctgtcagaaaccaagtgcactctgaagtccttcaccgtggagaagggcatctaccagacttcaaacttcagggtgcagcccaccgaatccatcgtcagattccctaacatcactaacctgtgccccttcggagaggtcttcaacgccacccgcttcgcttccgtgtacgcctggaacaggaagagaatctcaaactgcgtcgctgactactccgtgctgtacaactcagcctccttcagcaccttcaagtgctacggcgtgtcaccaactaagctgaacgacctgtgcttcaccaacgtctacgccgactccttcgtgatcaggggagacgaggtcagacagatcgctcctggccagactggaaagatcgccgactacaactacaagctgcccgacgacttcaccggttgcgtcatcgcttggaacagcaacaacctggactctaaagtgggtggcaactacaactacctgtaccgcctgttccgtaagtcaaacctgaagccattcgagagggacatcagcactgaaatctaccaggccggatctaccccttgcaacggtgtcgagggcttcaactgctacttccccctgcagtcctacggtttccagccaactaacggtgtgggctaccagccttacagagtggtcgtgctgagcttcgaactgctccacgctcctgctactgtgtgcggtccaaagaagtctaccaacctggtcaagaacaagtgcgtgaacttcaacttcaacggcctgaccggaactggtgtcctgaccgagagcaacaagaagttcctgcccttccagcagttcggaagggacatcgctgacaccactgacgctgtgcgcgaccctcagaccctggaaatcctggacatcactccatgctcattcggaggtgtctccgtgatcacccctggcaccaacacttctaaccaggtcgctgtgctgtaccaggacgtcaactgcaccgaggtccctgtggccatccacgctgaccagctgacccccacttggcgcgtgtactccaccggcagcaacgtgttccagactcgtgctggttgcctgatcggcgccgagcacgtgaacaacagctacgaatgcgacatccccatcggcgctggaatctgcgcctcttaccagacccagactaacagcccacagcaggctcagtctgtggcctctcagtcaatcatcgcttacaccatgtcactgggcgctgaaaactccgtggcctactctaacaactcaatcgccatccccaccaacttcactatcagcgtgaccactgagatcctgccagtcagcatgaccaagacttctgtggactgcactatgtacatctgcggagacagcaccgaatgctctaacctgctgctgcagtacggctctttctgcacccagctgaaccgtgctctgactggaatcgccgtggagcaggacaagaacactcaggaagtcttcgctcaggtgaagcaaatctacaagaccccacctatcaaggacttcggcggattcaacttctcccagatcctgcctgacccctccaagccaagcaagcgctctttcatcgaggacctgctgttcaacaaggtcactctggccgacgctggattcatcaagcagtacggagactgcctgggtgacatcgccgctcgtgacctgatctgcgctcagaagttcaacggtctgaccgtgctgcccccactgctgactgacgaaatgatcgcccagtacactagcgccctgctggctggaaccatcacttctggttggaccttcggtgctggcgccgctctgcagatccctttcgctatgcagatggcctaccgtttcaacggaatcggtgtcacccagaacgtgctgtacgagaaccagaagctgatcgctaaccagttcaactcagccatcggaaagatccaggacagcctgagctctactgcctctgctctgggcaagctgcaggacgtcgtgaaccagaacgcccaggctctgaacaccctggtcaagcagctgtcatccaacttcggtgctatcagctctgtgctgaacgacatcctgtcccgcctggacaaggtcgaggccgaagtgcagatcgaccgcctgatcactggccgtctgcagtcactgcagacctacgtgactcagcagctgatcagggccgctgaaatcagagcctccgctaacctggccgctaccaagatgagcgagtgcgtcctgggtcaatctaagcgtgtggacttctgcggcaagggataccacctgatgtcattccctcagtctgctccccacggtgtggtgttcctgcacgtcacctacgtgccagcccaggagaagaacttcaccactgcccctgctatctgccacgacggcaaggctcacttccccagggaaggtgtcttcgtgagcaacggcacccactggttcgtcactcagagaaacttctacgagccacagatcatcaccactgacaacactttcgtgtctggaaactgcgacgtggtcatcggtatcgtcaacaacaccgtgtacgaccccctgcagccagagctggactcattcaaggaggaactggacaagtacttcaagaaccacacctcccctgacgtcgacctgggcgacatctcaggaatcaacgcttccgtcgtgaacatccagaaggagatcgaccgcctgaacgaagtggccaagaacctgaacgaaagcctgatcgacctgcaggagctgggcaagtacgaacagtacatcaagtggcctcaccaccaccaccaccac

SEQ ID NO: 61 - protein, 1205 aa, synthetic construct
  REGION 1..1205: note = RECOMBINANT SPIKE PROTEIN
CVNLTTRTQLPPAYTNSFTRGVYYPDKVFRSSVLHSTQDLFLPFFSNVTWFHAIHVSGTNGTKRFDNPVLPFNDGVYFASTEKSNIIRGWIFGTTLDSKTQSLLIVNNATNVVIKVCEFQFCNDPFLGVYYHKNNKSWMESEFRVYSSANNCTFEYVSQPFLMDLEGKQGNFKNLREFVFKNIDGYFKIYSKHTPINLVRDLPQGFSALEPLVDLPIGINITRFQTLLALHRSYLTPGDSSSGWTAGAAAYYVGYLQPRTFLLKYNENGTITDAVDCALDPLSETKCTLKSFTVEKGIYQTSNFRVQPTESIVRFPNITNLCPFGEVFNATRFASVYAWNRKRISNCVADYSVLYNSASFSTFKCYGVSPTKLNDLCFTNVYADSFVIRGDEVRQIAPGQTGKIADYNYKLPDDFTGCVIAWNSNNLDSKVGGNYNYLYRLFRKSNLKPFERDISTEIYQAGSTPCNGVEGFNCYFPLQSYGFQPTNGVGYQPYRVVVLSFELLHAPATVCGPKKSTNLVKNKCVNFNFNGLTGTGVLTESNKKFLPFQQFGRDIADTTDAVRDPQTLEILDITPCSFGGVSVITPGTNTSNQVAVLYQDVNCTEVPVAIHADQLTPTWRVYSTGSNVFQTRAGCLIGAEHVNNSYECDIPIGAGICASYQTQTNSPQQAQSVASQSIIAYTMSLGAENSVAYSNNSIAIPTNFTISVTTEILPVSMTKTSVDCTMYICGDSTECSNLLLQYGSFCTQLNRALTGIAVEQDKNTQEVFAQVKQIYKTPPIKDFGGFNFSQILPDPSKPSKRSFIEDLLFNKVTLADAGFIKQYGDCLGDIAARDLICAQKFNGLTVLPPLLTDEMIAQYTSALLAGTITSGWTFGAGAALQIPFAMQMAYRFNGIGVTQNVLYENQKLIANQFNSAIGKIQDSLSSTASALGKLQDVVNQNAQALNTLVKQLSSNFGAISSVLNDILSRLDKVEAEVQIDRLITGRLQSLQTYVTQQLIRAAEIRASANLAATKMSECVLGQSKRVDFCGKGYHLMSFPQSAPHGVVFLHVTYVPAQEKNFTTAPAICHDGKAHFPREGVFVSNGTHWFVTQRNFYEPQIITTDNTFVSGNCDVVIGIVNNTVYDPLQPELDSFKEELDKYFKNHTSPDVDLGDISGINASVVNIQKEIDRLNEVAKNLNESLIDLQELGKYEQYIKWPHHHHHH

SEQ ID NO: 62 - protein, 1263 aa, synthetic construct
  REGION 1..1263: note = RECOMBINANT SPIKE PROTEIN
MFVFLVLLPLVSSQCVNLTTRTQLPPAYTNSFTRGVYYPDKVFRSSVLHSTQDLFLPFFSNVTWFHAIHVSGTNGTKRFDNPVLPFNDGVYFASTEKSNIIRGWIFGTTLDSKTQSLLIVNNATNVVIKVCEFQFCNDPFLGVYYHKNNKSWMESEFRVYSSANNCTFEYVSQPFLMDLEGKQGNFKNLREFVFKNIDGYFKIYSKHTPINLVRDLPQGFSALEPLVDLPIGINITRFQTLLALHRSYLTPGDSSSGWTAGAAAYYVGYLQPRTFLLKYNENGTITDAVDCALDPLSETKCTLKSFTVEKGIYQTSNFRVQPTESIVRFPNITNLCPFGEVFNATRFASVYAWNRKRISNCVADYSVLYNSASFSTFKCYGVSPTKLNDLCFTNVYADSFVIRGDEVRQIAPGQTGKIADYNYKLPDDFTGCVIAWNSNNLDSKVGGNYNYLYRLFRKSNLKPFERDISTEIYQAGSTPCNGVEGFNCYFPLQSYGFQPTNGVGYQPYRVVVLSFELLHAPATVCGPKKSTNLVKNKCVNFNFNGLTGTGVLTESNKKFLPFQQFGRDIADTTDAVRDPQTLEILDITPCSFGGVSVITPGTNTSNQVAVLYQDVNCTEVPVAIHADQLTPTWRVYSTGSNVFQTRAGCLIGAEHVNNSYECDIPIGAGICASYQTQTNSPQQAQSVALGAENSVAYSNNSIAIPTNFTISVTTEILPVSMTKTSVDCTMYICGDSTECSNLLLQYGSFCTQLNRALTGIAVEQDKNTQEVFAQVKQIYKTPPIKDFGGFNFSQILPDPSKPSKRSFIEDLLFNKVTLADAGFIKQYGDCLGDIAARDLICAQKFNGLTVLPPLLTDEMIAQYTSALLAGTITSGWTFGAGAALQIPFAMQMAYRFNGIGVTQNVLYENQKLIANQFNSAIGKIQDSLSSTASALGKLQDVVNQNAQALNTLVKQLSSNFGAISSVLNDILSRLDKVEAEVQIDRLITGRLQSLQTYVTQQLIRAAEIRASANLAATKMSECVLGQSKRVDFCGKGYHLMSFPQSAPHGVVFLHVTYVPAQEKNFTTAPAICHDGKAHFPREGVFVSNGTHWFVTQRNFYEPQIITTDNTFVSGNCDVVIGIVNNTVYDPLQPELDSFKEELDKYFKNHTSPDVDLGDISGINASVVNIQKEIDRLNEVAKNLNESLIDLQELGKYEQYIKWPWYIWLGFIAGLIAIVMVTIMLCCMTSCCSCLKGCCSCGSCCKFDEDDSEPVLKGVKLHYT

SEQ ID NO: 63 - protein, 1250 aa, synthetic construct
  REGION 1..1250: note = RECOMBINANT SPIKE PROTEIN
QCVNLTTRTQLPPAYTNSFTRGVYYPDKVFRSSVLHSTQDLFLPFFSNVTWFHAIHVSGTNGTKRFDNPVLPFNDGVYFASTEKSNIIRGWIFGTTLDSKTQSLLIVNNATNVVIKVCEFQFCNDPFLGVYYHKNNKSWMESEFRVYSSANNCTFEYVSQPFLMDLEGKQGNFKNLREFVFKNIDGYFKIYSKHTPINLVRDLPQGFSALEPLVDLPIGINITRFQTLLALHRSYLTPGDSSSGWTAGAAAYYVGYLQPRTFLLKYNENGTITDAVDCALDPLSETKCTLKSFTVEKGIYQTSNFRVQPTESIVRFPNITNLCPFGEVFNATRFASVYAWNRKRISNCVADYSVLYNSASFSTFKCYGVSPTKLNDLCFTNVYADSFVIRGDEVRQIAPGQTGKIADYNYKLPDDFTGCVIAWNSNNLDSKVGGNYNYLYRLFRKSNLKPFERDISTEIYQAGSTPCNGVEGFNCYFPLQSYGFQPTNGVGYQPYRVVVLSFELLHAPATVCGPKKSTNLVKNKCVNFNFNGLTGTGVLTESNKKFLPFQQFGRDIADTTDAVRDPQTLEILDITPCSFGGVSVITPGTNTSNQVAVLYQDVNCTEVPVAIHADQLTPTWRVYSTGSNVFQTRAGCLIGAEHVNNSYECDIPIGAGICASYQTQTNSPQQAQSVALGAENSVAYSNNSIAIPTNFTISVTTEILPVSMTKTSVDCTMYICGDSTECSNLLLQYGSFCTQLNRALTGIAVEQDKNTQEVFAQVKQIYKTPPIKDFGGFNFSQILPDPSKPSKRSFIEDLLFNKVTLADAGFIKQYGDCLGDIAARDLICAQKFNGLTVLPPLLTDEMIAQYTSALLAGTITSGWTFGAGAALQIPFAMQMAYRFNGIGVTQNVLYENQKLIANQFNSAIGKIQDSLSSTASALGKLQDVVNQNAQALNTLVKQLSSNFGAISSVLNDILSRLDKVEAEVQIDRLITGRLQSLQTYVTQQLIRAAEIRASANLAATKMSECVLGQSKRVDFCGKGYHLMSFPQSAPHGVVFLHVTYVPAQEKNFTTAPAICHDGKAHFPREGVFVSNGTHWFVTQRNFYEPQIITTDNTFVSGNCDVVIGIVNNTVYDPLQPELDSFKEELDKYFKNHTSPDVDLGDISGINASVVNIQKEIDRLNEVAKNLNESLIDLQELGKYEQYIKWPWYIWLGFIAGLIAIVMVTIMLCCMTSCCSCLKGCCSCGSCCKFDEDDSEPVLKGVKLHYT

SEQ ID NO: 64 - protein, 1263 aa, synthetic construct
  REGION 1..1263: note = RECOMBINANT SPIKE PROTEIN
MFVFLVLLPLVSSQCVNLTTRTQLPPAYTNSFTRGVYYPDKVFRSSVLHSTQDLFLPFFSNVTWFHAIHVSGTNGTKRFDNPVLPFNDGVYFASTEKSNIIRGWIFGTTLDSKTQSLLIVNNATNVVIKVCEFQFCNDPFLGVYYHKNNKSWMESEFRVYSSANNCTFEYVSQPFLMDLEGKQGNFKNLREFVFKNIDGYFKIYSKHTPINLVRDLPQGFSALEPLVDLPIGINITRFQTLLALHRSYLTPGDSSSGWTAGAAAYYVGYLQPRTFLLKYNENGTITDAVDCALDPLSETKCTLKSFTVEKGIYQTSNFRVQPTESIVRFPNITNLCPFGEVFNATRFASVYAWNRKRISNCVADYSVLYNSASFSTFKCYGVSPTKLNDLCFTNVYADSFVIRGDEVRQIAPGQTGKIADYNYKLPDDFTGCVIAWNSNNLDSKVGGNYNYLYRLFRKSNLKPFERDISTEIYQAGSTPCNGVEGFNCYFPLQSYGFQPTNGVGYQPYRVVVLSFELLHAPATVCGPKKSTNLVKNKCVNFNFNGLTGTGVLTESNKKFLPFQQFGRDIADTTDAVRDPQTLEILDITPCSFGGVSVITPGTNTSNQVAVLYQDVNCTEVPVAIHADQLTPTWRVYSTGSNVFQTRAGCLIGAEHVNNSYECDIPIGAGICASYQTQTNSPQQAQSVASQSIIAYTMSLGAENSVAYSNNSIAIEILPVSMTKTSVDCTMYICGDSTECSNLLLQYGSFCTQLNRALTGIAVEQDKNTQEVFAQVKQIYKTPPIKDFGGFNFSQILPDPSKPSKRSFIEDLLFNKVTLADAGFIKQYGDCLGDIAARDLICAQKFNGLTVLPPLLTDEMIAQYTSALLAGTITSGWTFGAGAALQIPFAMQMAYRFNGIGVTQNVLYENQKLIANQFNSAIGKIQDSLSSTASALGKLQDVVNQNAQALNTLVKQLSSNFGAISSVLNDILSRLDKVEAEVQIDRLITGRLQSLQTYVTQQLIRAAEIRASANLAATKMSECVLGQSKRVDFCGKGYHLMSFPQSAPHGVVFLHVTYVPAQEKNFTTAPAICHDGKAHFPREGVFVSNGTHWFVTQRNFYEPQIITTDNTFVSGNCDVVIGIVNNTVYDPLQPELDSFKEELDKYFKNHTSPDVDLGDISGINASVVNIQKEIDRLNEVAKNLNESLIDLQELGKYEQYIKWPWYIWLGFIAGLIAIVMVTIMLCCMTSCCSCLKGCCSCGSCCKFDEDDSEPVLKGVKLHYT

SEQ ID NO: 65 - protein, 1250 aa, synthetic construct
  REGION 1..1250: note = RECOMBINANT SPIKE PROTEIN
QCVNLTTRTQLPPAYTNSFTRGVYYPDKVFRSSVLHSTQDLFLPFFSNVTWFHAIHVSGTNGTKRFDNPVLPFNDGVYFASTEKSNIIRGWIFGTTLDSKTQSLLIVNNATNVVIKVCEFQFCNDPFLGVYYHKNNKSWMESEFRVYSSANNCTFEYVSQPFLMDLEGKQGNFKNLREFVFKNIDGYFKIYSKHTPINLVRDLPQGFSALEPLVDLPIGINITRFQTLLALHRSYLTPGDSSSGWTAGAAAYYVGYLQPRTFLLKYNENGTITDAVDCALDPLSETKCTLKSFTVEKGIYQTSNFRVQPTESIVRFPNITNLCPFGEVFNATRFASVYAWNRKRISNCVADYSVLYNSASFSTFKCYGVSPTKLNDLCFTNVYADSFVIRGDEVRQIAPGQTGKIADYNYKLPDDFTGCVIAWNSNNLDSKVGGNYNYLYRLFRKSNLKPFERDISTEIYQAGSTPCNGVEGFNCYFPLQSYGFQPTNGVGYQPYRVVVLSFELLHAPATVCGPKKSTNLVKNKCVNFNFNGLTGTGVLTESNKKFLPFQQFGRDIADTTDAVRDPQTLEILDITPCSFGGVSVITPGTNTSNQVAVLYQDVNCTEVPVAIHADQLTPTWRVYSTGSNVFQTRAGCLIGAEHVNNSYECDIPIGAGICASYQTQTNSPQQAQSVASQSIIAYTMSLGAENSVAYSNNSIAIEILPVSMTKTSVDCTMYICGDSTECSNLLLQYGSFCTQLNRALTGIAVEQDKNTQEVFAQVKQIYKTPPIKDFGGFNFSQILPDPSKPSKRSFIEDLLFNKVTLADAGFIKQYGDCLGDIAARDLICAQKFNGLTVLPPLLTDEMIAQYTSALLAGTITSGWTFGAGAALQIPFAMQMAYRFNGIGVTQNVLYENQKLIANQFNSAIGKIQDSLSSTASALGKLQDVVNQNAQALNTLVKQLSSNFGAISSVLNDILSRLDKVEAEVQIDRLITGRLQSLQTYVTQQLIRAAEIRASANLAATKMSECVLGQSKRVDFCGKGYHLMSFPQSAPHGVVFLHVTYVPAQEKNFTTAPAICHDGKAHFPREGVFVSNGTHWFVTQRNFYEPQIITTDNTFVSGNCDVVIGIVNNTVYDPLQPELDSFKEELDKYFKNHTSPDVDLGDISGINASVVNIQKEIDRLNEVAKNLNESLIDLQELGKYEQYIKWPWYIWLGFIAGLIAIVMVTIMLCCMTSCCSCLKGCCSCGSCCKFDEDDSEPVLKGVKLHYT

SEQ ID NO: 66 - protein, 1263 aa, synthetic construct
  REGION 1..1263: note = RECOMBINANT SPIKE PROTEIN
MFVFLVLLPLVSSQCVNLTTRTQLPPAYTNSFTRGVYYPDKVFRSSVLHSTQDLFLPFFSNVTWFHAIHVSGTNGTKRFDNPVLPFNDGVYFASTEKSNIIRGWIFGTTLDSKTQSLLIVNNATNVVIKVCEFQFCNDPFLGVYYHKNNKSWMESEFRVYSSANNCTFEYVSQPFLMDLEGKQGNFKNLREFVFKNIDGYFKIYSKHTPINLVRDLPQGFSALEPLVDLPIGINITRFQTLLALHRSYLTPGDSSSGWTAGAAAYYVGYLQPRTFLLKYNENGTITDAVDCALDPLSETKCTLKSFTVEKGIYQTSNFRVQPTESIVRFPNITNLCPFGEVFNATRFASVYAWNRKRISNCVADYSVLYNSASFSTFKCYGVSPTKLNDLCFTNVYADSFVIRGDEVRQIAPGQTGKIADYNYKLPDDFTGCVIAWNSNNLDSKVGGNYNYLYRLFRKSNLKPFERDISTEIYQAGSTPCNGVEGFNCYFPLQSYGFQPTNGVGYQPYRVVVLSFELLHAPATVCGPKKSTNLVKNKCVNFNFNGLTGTGVLTESNKKFLPFQQFGRDIADTTDAVRDPQTLEILDITPCSFGGVSVITPGTNTSNQVAVLYQDVNCTEVPVAIHADQLTPTWRVYSTGSNVFQTRAGCLIGAEHVNNSYECDIPIGAGICASYQTQTNSPQQAQSVASQSIIAYTMSLGAENSVAYSNNSIAIPTNFTISVTTEILPVSMTKTSVDCTMYICGDSTECSNLLLQYGSFCTQLNRALTGIAVEQDKNTQEVFAQVKQIYKTPPIKDFGGFNFSQILPDPSKPSKRSFIADAGFIKQYGDCLGDIAARDLICAQKFNGLTVLPPLLTDEMIAQYTSALLAGTITSGWTFGAGAALQIPFAMQMAYRFNGIGVTQNVLYENQKLIANQFNSAIGKIQDSLSSTASALGKLQDVVNQNAQALNTLVKQLSSNFGAISSVLNDILSRLDKVEAEVQIDRLITGRLQSLQTYVTQQLIRAAEIRASANLAATKMSECVLGQSKRVDFCGKGYHLMSFPQSAPHGVVFLHVTYVPAQEKNFTTAPAICHDGKAHFPREGVFVSNGTHWFVTQRNFYEPQIITTDNTFVSGNCDVVIGIVNNTVYDPLQPELDSFKEELDKYFKNHTSPDVDLGDISGINASVVNIQKEIDRLNEVAKNLNESLIDLQELGKYEQYIKWPWYIWLGFIAGLIAIVMVTIMLCCMTSCCSCLKGCCSCGSCCKFDEDDSEPVLKGVKLHYT

SEQ ID NO: 67 - protein, 1250 aa, synthetic construct
  REGION 1..1250: note = RECOMBINANT SPIKE PROTEIN
QCVNLTTRTQLPPAYTNSFTRGVYYPDKVFRSSVLHSTQDLFLPFFSNVTWFHAIHVSGTNGTKRFDNPVLPFNDGVYFASTEKSNIIRGWIFGTTLDSKTQSLLIVNNATNVVIKVCEFQFCNDPFLGVYYHKNNKSWMESEFRVYSSANNCTFEYVSQPFLMDLEGKQGNFKNLREFVFKNIDGYFKIYSKHTPINLVRDLPQGFSALEPLVDLPIGINITRFQTLLALHRSYLTPGDSSSGWTAGAAAYYVGYLQPRTFLLKYNENGTITDAVDCALDPLSETKCTLKSFTVEKGIYQTSNFRVQPTESIVRFPNITNLCPFGEVFNATRFASVYAWNRKRISNCVADYSVLYNSASFSTFKCYGVSPTKLNDLCFTNVYADSFVIRGDEVRQIAPGQTGKIADYNYKLPDDFTGCVIAWNSNNLDSKVGGNYNYLYRLFRKSNLKPFERDISTEIYQAGSTPCNGVEGFNCYFPLQSYGFQPTNGVGYQPYRVVVLSFELLHAPATVCGPKKSTNLVKNKCVNFNFNGLTGTGVLTESNKKFLPFQQFGRDIADTTDAVRDPQTLEILDITPCSFGGVSVITPGTNTSNQVAVLYQDVNCTEVPVAIHADQLTPTWRVYSTGSNVFQTRAGCLIGAEHVNNSYECDIPIGAGICASYQTQTNSPQQAQSVASQSIIAYTMSLGAENSVAYSNNSIAIPTNFTISVTTEILPVSMTKTSVDCTMYICGDSTECSNLLLQYGSFCTQLNRALTGIAVEQDKNTQEVFAQVKQIYKTPPIKDFGGFNFSQILPDPSKPSKRSFIADAGFIKQYGDCLGDIAARDLICAQKFNGLTVLPPLLTDEMIAQYTSALLAGTITSGWTFGAGAALQIPFAMQMAYRFNGIGVTQNVLYENQKLIANQFNSAIGKIQDSLSSTASALGKLQDVVNQNAQALNTLVKQLSSNFGAISSVLNDILSRLDKVEAEVQIDRLITGRLQSLQTYVTQQLIRAAEIRASANLAATKMSECVLGQSKRVDFCGKGYHLMSFPQSAPHGVVFLHVTYVPAQEKNFTTAPAICHDGKAHFPREGVFVSNGTHWFVTQRNFYEPQIITTDNTFVSGNCDVVIGIVNNTVYDPLQPELDSFKEELDKYFKNHTSPDVDLGDISGINASVVNIQKEIDRLNEVAKNLNESLIDLQELGKYEQYIKWPWYIWLGFIAGLIAIVMVTIMLCCMTSCCSCLKGCCSCGSCCKFDEDDSEPVLKGVKLHYT

SEQ ID NO: 68 - protein, 31 aa, synthetic construct
  REGION 1..31: note = Foldon
SAIGGYIPEAPRDGQAYVRKDGEWVLLSTFL

SEQ ID NO: 69 - protein, 202 aa, Severe acute respiratory syndrome-related coronavirus
RFPNITNLCPFGEVFNATRFASVYAWNRKRISNCVADYSVLYNSASFSTFKCYGVSPTKLNDLCFTNVYADSFVIRGDEVRQIAPGQTGKIADYNYKLPDDFTGCVIAWNSNNLDSKVGGNYNYLYRLFRKSNLKPFERDISTEIYQAGSTPCNGVEGFNCYFPLQSYGFQPTNGVGYQPYRVVVLSFELLHAPATVCGPKK

SEQ ID NO: 70 - protein, 201 aa, Severe acute respiratory syndrome-related coronavirus
RFPNITNLCPFGEVFNATKFPSVYAWERKKISNCVADYSVLYNSTFFSTFKCYGVSATKLNDLCFSNVYADSFVVKGDDVRQIAPGQTGVIADYNYKLPDDFMGCVLAWNTRNIDATSTGNYNYKYRYLRHGKLRPFERDISNVPFSPDGKPCTPPALNCYWPLNDYGFYTTTGIGYQPYRVVVLSFELLNAPATVCGPKL

SEQ ID NO: 71 - protein, 239 aa, Severe acute respiratory syndrome-related coronavirus
FEAKPSGSVVAEGVECDFSPLLSGTPPQVYNFKRLVFTNCNYNLTKLLSLFSVNDFTCSQISPAAIASNCYSSLILDYFSYPLSMKSDLSVSSAGPISQFNYKQSFSNPTCLILATVPHNLTTITKPLKYSYINKCSRLLSDDRTEVPQLVNANQYSPCVSIVPSTVWEDGDYYRKQLSPLEGGGWLVASGSTVAMTEQLQMGFGITVQYGTDTNSVCPKLEFANDTKIASQLGNCVEY

SEQ ID NO: 72 - protein, 544 aa, synthetic construct
  REGION 1..544: note = RECOMBINANT SPIKE PROTEIN
MFVFLVLLPLVSSRFPNITNLCPFGEVFNATRFASVYAWNRKRISNCVADYSVLYNSASFSTFKCYGVSPTKLNDLCFTNVYADSFVIRGDEVRQIAPGQTGKIADYNYKLPDDFTGCVIAWNSNNLDSKVGGNYNYLYRLFRKSNLKPFERDISTEIYQAGSTPCNGVEGFNCYFPLQSYGFQPTNGVGYQPYRVVVLSFELLHAPATVCGPKKSTNLVKNKCVNFNFNGLTGTGVLTESNKKFLPFQQFGRDIADTTDAVRDPQTLEILDITPCSFGGVSVITPGTNTSNQVAVLYQDVNCTERFPNITNLCPFGEVFNATRFASVYAWNRKRISNCVADYSVLYNSASFSTFKCYGVSPTKLNDLCFTNVYADSFVIRGDEVRQIAPGQTGKIADYNYKLPDDFTGCVIAWNSNNLDSKVGGNYNYLYRLFRKSNLKPFERDISTEIYQAGSTPCNGVEGFNCYFPLQSYGFQPTNGVGYQPYRVVVLSFELLHAPATVCGPKKSAIGGYIPEAPRDGQAYVRKDGEWVLLSTFLHHHHHH

SEQ ID NO: 73 - protein, 531 aa, synthetic construct
  REGION 1..531: note = RECOMBINANT SPIKE PROTEIN
RFPNITNLCPFGEVFNATRFASVYAWNRKRISNCVADYSVLYNSASFSTFKCYGVSPTKLNDLCFTNVYADSFVIRGDEVRQIAPGQTGKIADYNYKLPDDFTGCVIAWNSNNLDSKVGGNYNYLYRLFRKSNLKPFERDISTEIYQAGSTPCNGVEGFNCYFPLQSYGFQPTNGVGYQPYRVVVLSFELLHAPATVCGPKKSTNLVKNKCVNFNFNGLTGTGVLTESNKKFLPFQQFGRDIADTTDAVRDPQTLEILDITPCSFGGVSVITPGTNTSNQVAVLYQDVNCTERFPNITNLCPFGEVFNATRFASVYAWNRKRISNCVADYSVLYNSASFSTFKCYGVSPTKLNDLCFTNVYADSFVIRGDEVRQIAPGQTGKIADYNYKLPDDFTGCVIAWNSNNLDSKVGGNYNYLYRLFRKSNLKPFERDISTEIYQAGSTPCNGVEGFNCYFPLQSYGFQPTNGVGYQPYRVVVLSFELLHAPATVCGPKKSAIGGYIPEAPRDGQAYVRKDGEWVLLSTFLHHHHHH

SEQ ID NO: 74 - protein, 544 aa, synthetic construct; identical to SEQ ID NO: 72
  REGION 1..544: note = RECOMBINANT SPIKE PROTEIN

SEQ ID NO: 75 - protein, 531 aa, synthetic construct; identical to SEQ ID NO: 73
  REGION 1..531: note = RECOMBINANT SPIKE PROTEIN

SEQ ID NO: 76 - protein, 470 aa, synthetic construct
  REGION 1..470: note = RECOMBINANT SPIKE PROTEIN
MFVFLVLLPLVSSRFPNITNLCPFGEVFNATRFASVYAWNRKRISNCVADYSVLYNSASFSTFKCYGVSPTKLNDLCFTNVYADSFVIRGDEVRQIAPGQTGKIADYNYKLPDDFTGCVIAWNSNNLDSKVGGNYNYLYRLFRKSNLKPFERDISTEIYQAGSTPCNGVEGFNCYFPLQSYGFQPTNGVGYQPYRVVVLSFELLHAPATVCGPKKSGGGSGGGSGGGSGGGSRFPNITNLCPFGEVFNATKFPSVYAWERKKISNCVADYSVLYNSTFFSTFKCYGVSATKLNDLCFSNVYADSFVVKGDDVRQIAPGQTGVIADYNYKLPDDFMGCVLAWNTRNIDATSTGNYNYKYRYLRHGKLRPFERDISNVPFSPDGKPCTPPALNCYWPLNDYGFYTTTGIGYQPYRVVVLSFELLNAPATVCGPKLSAIGGYIPEAPRDGQAYVRKDGEWVLLSTFLHHHHHH

SEQ ID NO: 77 - protein, 464 aa, synthetic construct
  REGION 1..464: note = RECOMBINANT SPIKE PROTEIN
MFVFLVLLPLVSSRFPNITNLCPFGEVFNATRFASVYAWNRKRISNCVADYSVLYNSASFSTFKCYGVSPTKLNDLCFTNVYADSFVIRGDEVRQIAPGQTGKIADYNYKLPDDFTGCVIAWNSNNLDSKVGGNYNYLYRLFRKSNLKPFERDISTEIYQAGSTPCNGVEGFNCYFPLQSYGFQPTNGVGYQPYRVVVLSFELLHAPATVCGPKKSGGGSGGGSGGGSGGGSRFPNITNLCPFGEVFNATKFPSVYAWERKKISNCVADYSVLYNSTFFSTFKCYGVSATKLNDLCFSNVYADSFVVKGDDVRQIAPGQTGVIADYNYKLPDDFMGCVLAWNTRNIDATSTGNYNYKYRYLRHGKLRPFERDISNVPFSPDGKPCTPPALNCYWPLNDYGFYTTTGIGYQPYRVVVLSFELLNAPATVCGPKLSAIGGYIPEAPRDGQAYVRKDGEWVLLSTFL

SEQ ID NO: 78 - protein, 457 aa, synthetic construct
  REGION 1..457: note = RECOMBINANT SPIKE PROTEIN
RFPNITNLCPFGEVFNATRFASVYAWNRKRISNCVADYSVLYNSASFSTFKCYGVSPTKLNDLCFTNVYADSFVIRGDEVRQIAPGQTGKIADYNYKLPDDFTGCVIAWNSNNLDSKVGGNYNYLYRLFRKSNLKPFERDISTEIYQAGSTPCNGVEGFNCYFPLQSYGFQPTNGVGYQPYRVVVLSFELLHAPATVCGPKKSGGGSGGGSGGGSGGGSRFPNITNLCPFGEVFNATKFPSVYAWERKKISNCVADYSVLYNSTFFSTFKCYGVSATKLNDLCFSNVYADSFVVKGDDVRQIAPGQTGVIADYNYKLPDDFMGCVLAWNTRNIDATSTGNYNYKYRYLRHGKLRPFERDISNVPFSPDGKPCTPPALNCYWPLNDYGFYTTTGIGYQPYRVVVLSFELLNAPATVCGPKLSAIGGYIPEAPRDGQAYVRKDGEWVLLSTFLHHHHHH

SEQ ID NO: 79 - protein, 451 aa, synthetic construct
  REGION 1..451: note = RECOMBINANT SPIKE PROTEIN
RFPNITNLCPFGEVFNATRFASVYAWNRKRISNCVADYSVLYNSASFSTFKCYGVSPTKLNDLCFTNVYADSFVIRGDEVRQIAPGQTGKIADYNYKLPDDFTGCVIAWNSNNLDSKVGGNYNYLYRLFRKSNLKPFERDISTEIYQAGSTPCNGVEGFNCYFPLQSYGFQPTNGVGYQPYRVVVLSFELLHAPATVCGPKKSGGGSGGGSGGGSGGGSRFPNITNLCPFGEVFNATKFPSVYAWERKKISNCVADYSVLYNSTFFSTFKCYGVSATKLNDLCFSNVYADSFVVKGDDVRQIAPGQTGVIADYNYKLPDDFMGCVLAWNTRNIDATSTGNYNYKYRYLRHGKLRPFERDISNVPFSPDGKPCTPPALNCYWPLNDYGFYTTTGIGYQPYRVVVLSFELLNAPATVCGPKLSAIGGYIPEAPRDGQAYVRKDGEWVLLSTFL

SEQ ID NO: 80 - protein, 726 aa, synthetic construct
  REGION 1..726: note = RECOMBINANT SPIKE PROTEIN
MFVFLVLLPLVSSRFPNITNLCPFGEVFNATRFASVYAWNRKRISNCVADYSVLYNSASFSTFKCYGVSPTKLNDLCFTNVYADSFVIRGDEVRQIAPGQTGKIADYNYKLPDDFTGCVIAWNSNNLDSKVGGNYNYLYRLFRKSNLKPFERDISTEIYQAGSTPCNGVEGFNCYFPLQSYGFQPTNGVGYQPYRVVVLSFELLHAPATVCGPKKSGGGSGGGSGGGSGGGSFEAKPSGSVVAEGVECDFSPLLSGTPPQVYNFKRLVFTNCNYNLTKLLSLFSVNDFTCSQISPAAIASNCYSSLILDYFSYPLSMKSDLSVSSAGPISQFNYKQSFSNPTCLILATVPHNLTTITKPLKYSYINKCSRLLSDDRTEVPQLVNANQYSPCVSIVPSTVWEDGDYYRKQLSPLEGGGWLVASGSTVAMTEQLQMGFGITVQYGTDTNSVCPKLEFANDTKIASQLGNCVEYSGGGSGGGSGGGSGGGSRFPNITNLCPFGEVFNATKFPSVYAWERKKISNCVADYSVLYNSTFFSTFKCYGVSATKLNDLCFSNVYADSFVVKGDDVRQIAPGQTGVIADYNYKLPDDFMGCVLAWNTRNIDATSTGNYNYKYRYLRHGKLRPFERDISNVPFSPDGKPCTPPALNCYWPLNDYGFYTTTGIGYQPYRVVVLSFELLNAPATVCGPKLSAIGGYIPEAPRDGQAYVRKDGEWVLLSTFLHHHHHH

SEQ ID NO: 81 - protein, 720 aa, synthetic construct
  REGION 1..720: note = RECOMBINANT SPIKE PROTEIN
MFVFLVLLPLVSSRFPNITNLCPFGEVFNATRFASVYAWNRKRISNCVADYSVLYNSASFSTFKCYGVSPTKLNDLCFTNVYADSFVIRGDEVRQIAPGQTGKIADYNYKLPDDFTGCVIAWNSNNLDSKVGGNYNYLYRLFRKSNLKPFERDISTEIYQAGSTPCNGVEGFNCYFPLQSYGFQPTNGVGYQPYRVVVLSFELLHAPATVCGPKKSGGGSGGGSGGGSGGGSFEAKPSGSVVAEGVECDFSPLLSGTPPQVYNFKRLVFTNCNYNLTKLLSLFSVNDFTCSQISPAAIASNCYSSLILDYFSYPLSMKSDLSVSSAGPISQFNYKQSFSNPTCLILATVPHNLTTITKPLKYSYINKCSRLLSDDRTEVPQLVNANQYSPCVSIVPSTVWEDGDYYRKQLSPLEGGGWLVASGSTVAMTEQLQMGFGITVQYGTDTNSVCPKLEFANDTKIASQLGNCVEYSGGGSGGGSGGGSGGGSRFPNITNLCPFGEVFNATKFPSVYAWERKKISNCVADYSVLYNSTFFSTFKCYGVSATKLNDLCFSNVYADSFVVKGDDVRQIAPGQTGVIADYNYKLPDDFMGCVLAWNTRNIDATSTGNYNYKYRYLRHGKLRPFERDISNVPFSPDGKPCTPPALNCYWPLNDYGFYTTTGIGYQPYRVVVLSFELLNAPATVCGPKLSAIGGYIPEAPRDGQAYVRKDGEWVLLSTFL

SEQ ID NO: 82 - protein, 713 aa, synthetic construct
  REGION 1..713: note = RECOMBINANT SPIKE PROTEIN
RFPNITNLCPFGEVFNATRFASVYAWNRKRISNCVADYSVLYNSASFSTFKCYGVSPTKLNDLCFTNVYADSFVIRGDEVRQIAPGQTGKIADYNYKLPDDFTGCVIAWNSNNLDSKVGGNYNYLYRLFRKSNLKPFERDISTEIYQAGSTPCNGVEGFNCYFPLQSYGFQPTNGVGYQPYRVVVLSFELLHAPATVCGPKKSGGGSGGGSGGGSGGGSFEAKPSGSVVAEGVECDFSPLLSGTPPQVYNFKRLVFTNCNYNLTKLLSLFSVNDFTCSQISPAAIASNCYSSLILDYFSYPLSMKSDLSVSSAGPISQFNYKQSFSNPTCLILATVPHNLTTITKPLKYSYINKCSRLLSDDRTEVPQLVNANQYSPCVSIVPSTVWEDGDYYRKQLSPLEGGGWLVASGSTVAMTEQLQMGFGITVQYGTDTNSVCPKLEFANDTKIASQLGNCVEYSGGGSGGGSGGGSGGGSRFPNITNLCPFGEVFNATKFPSVYAWERKKISNCVADYSVLYNSTFFSTFKCYGVSATKLNDLCFSNVYADSFVVKGDDVRQIAPGQTGVIADYNYKLPDDFMGCVLAWNTRNIDATSTGNYNYKYRYLRHGKLRPFERDISNVPFSPDGKPCTPPALNCYWPLNDYGFYTTTGIGYQPYRVVVLSFELLNAPATVCGPKLSAIGGYIPEAPRDGQAYVRKDGEWVLLSTFLHHHHHH

SEQ ID NO: 83 - protein, 707 aa, synthetic construct
  REGION 1..707: note = RECOMBINANT SPIKE PROTEIN
RFPNITNLCPFGEVFNATRFASVYAWNRKRISNCVADYSVLYNSASFSTFKCYGVSPTKLNDLCFTNVYADSFVIRGDEVRQIAPGQTGKIADYNYKLPDDFTGCVIAWNSNNLDSKVGGNYNYLYRLFRKSNLKPFERDISTEIYQAGSTPCNGVEGFNCYFPLQSYGFQPTNGVGYQPYRVVVLSFELLHAPATVCGPKKSGGGSGGGSGGGSGGGSFEAKPSGSVVAEGVECDFSPLLSGTPPQVYNFKRLVFTNCNYNLTKLLSLFSVNDFTCSQISPAAIASNCYSSLILDYFSYPLSMKSDLSVSSAGPISQFNYKQSFSNPTCLILATVPHNLTTITKPLKYSYINKCSRLLSDDRTEVPQLVNANQYSPCVSIVPSTVWEDGDYYRKQLSPLEGGGWLVASGSTVAMTEQLQMGFGITVQYGTDTNSVCPKLEFANDTKIASQLGNCVEYSGGGSGGGSGGGSGGGSRFPNITNLCPFGEVFNATKFPSVYAWERKKISNCVADYSVLYNSTFFSTFKCYGVSATKLNDLCFSNVYADSFVVKGDDVRQIAPGQTGVIADYNYKLPDDFMGCVLAWNTRNIDATSTGNYNYKYRYLRHGKLRPFERDISNVPFSPDGKPCTPPALNCYWPLNDYGFYTTTGIGYQPYRVVVLSFELLNAPATVCGPKLSAIGGYIPEAPRDGQAYVRKDGEWVLLSTFL

SEQ ID NO: 84 - protein, 1273 aa, synthetic construct
  REGION 1..1273: note = RECOMBINANT SPIKE PROTEIN
MFVFLVLLPLVSSQCVNLTTRTQLPPAYTNSFTRGVYYPDKVFRSSVLHSTQDLFLPFFSNVTWFHAIHVSGTNGTKRFDNPVLPFNDGVYFASTEKSNIIRGWIFGTTLDSKTQSLLIVNNATNVVIKVCEFQFCNDPFLGVYYHKNNKSWMESEFRVYSSANNCTFEYVSQPFLMDLEGKQGNFKNLREFVFKNIDGYFKIYSKHTPINLVRDLPQGFSALEPLVDLPIGINITRFQTLLALHRSYLTPGDSSSGWTAGAAAYYVGYLQPRTFLLKYNENGTITDAVDCALDPLSETKCTLKSFTVEKGIYQTSNFRVQPTESIVRFPNITNLCPFGEVFNATRFASVYAWNRKRISNCVADYSVLYNSASFSTFKCYGVSPTKLNDLCFTNVYADSFVIRGDEVRQIAPGQTGKIADYNYKLPDDFTGCVIAWNSNNLDSKVGGNYNYLYRLFRKSNLKPFERDISTEIYQAGSTPCNGVEGFNCYFPLQSYGFQPTNGVGYQPYRVVVLSFELLHAPATVCGPKKSTNLVKNKCVNFNFNGLTGTGVLTESNKKFLPFQQFGRDIADTTDAVRDPQTLEILDITPCSFGGVSVITPGTNTSNQVAVLYQDVNCTEVPVAIHADQLTPTWRVYSTGSNVFQTRAGCLIGAEHVNNSYECDIPIGAGICASYQTQTNSPRRARSVASQSIIAYTMSLGAENSVAYSNNSIAIPTNFTISVTTEILPVSMTKTSVDCTMYICGDSTECSNLLLQYGSFCTQLNRALTGIAVEQDKNTQEVFAQVKQIYKTPPIKDFGGFNFSQILPDPSKPSKRSFIEDLLFNKVTLADAGFIKQYGDCLGDIAARDLICAQKFNGLTVLPPLLTDEMIAQYTSALLAGTITSGWTFGAGAALQIPFAMQMAYRFNGIGVTQNVLYENQKLIANQFNSAIGKIQDSLSSTASALGKLQDVVNQNAQALNTLVKQLSSNFGAISSVLNDILSRLDPPEAEVQIDRLITGRLQSLQTYVTQQLIRAAEIRASANLAATKMSECVLGQSKRVDFCGKGYHLMSFPQSAPHGVVFLHVTYVPAQEKNFTTAPAICHDGKAHFPREGVFVSNGTHWFVTQRNFYEPQIITTDNTFVSGNCDVVIGIVNNTVYDPLQPELDSFKEELDKYFKNHTSPDVDLGDISGINASVVNIQKEIDRLNEVAKNLNESLIDLQELGKYEQYIKWPWYIWLGFIAGLIAIVMVTIMLCCMTSCCSCLKGCCSCGSCCKFDEDDSEPVLKGVKLHYT

SEQ ID NO: 85 - protein, 1260 aa, synthetic construct
  REGION 1..1260: note = RECOMBINANT SPIKE PROTEIN
QCVNLTTRTQLPPAYTNSFTRGVYYPDKVFRSSVLHSTQDLFLPFFSNVTWFHAIHVSGTNGTKRFDNPVLPFNDGVYFASTEKSNIIRGWIFGTTLDSKTQSLLIVNNATNVVIKVCEFQFCNDPFLGVYYHKNNKSWMESEFRVYSSANNCTFEYVSQPFLMDLEGKQGNFKNLREFVFKNIDGYFKIYSKHTPINLVRDLPQGFSALEPLVDLPIGINITRFQTLLALHRSYLTPGDSSSGWTAGAAAYYVGYLQPRTFLLKYNENGTITDAVDCALDPLSETKCTLKSFTVEKGIYQTSNFRVQPTESIVRFPNITNLCPFGEVFNATRFASVYAWNRKRISNCVADYSVLYNSASFSTFKCYGVSPTKLNDLCFTNVYADSFVIRGDEVRQIAPGQTGKIADYNYKLPDDFTGCVIAWNSNNLDSKVGGNYNYLYRLFRKSNLKPFERDISTEIYQAGSTPCNGVEGFNCYFPLQSYGFQPTNGVGYQPYRVVVLSFELLHAPATVCGPKKSTNLVKNKCVNFNFNGLTGTGVLTESNKKFLPFQQFGRDIADTTDAVRDPQTLEILDITPCSFGGVSVITPGTNTSNQVAVLYQDVNCTEVPVAIHADQLTPTWRVYSTGSNVFQTRAGCLIGAEHVNNSYECDIPIGAGICASYQTQTNSPRRARSVASQSIIAYTMSLGAENSVAYSNNSIAIPTNFTISVTTEILPVSMTKTSVDCTMYICGDSTECSNLLLQYGSFCTQLNRALTGIAVEQDKNTQEVFAQVKQIYKTPPIKDFGGFNFSQILPDPSKPSKRSFIEDLLFNKVTLADAGFIKQYGDCLGDIAARDLICAQKFNGLTVLPPLLTDEMIAQYTSALLAGTITSGWTFGAGAALQIPFAMQMAYRFNGIGVTQNVLYENQKLIANQFNSAIGKIQDSLSSTASALGKLQDVVNQNAQALNTLVKQLSSNFGAISSVLNDILSRLDPPEAEVQIDRLITGRLQSLQTYVTQQLIRAAEIRASANLAATKMSECVLGQSKRVDFCGKGYHLMSFPQSAPHGVVFLHVTYVPAQEKNFTTAPAICHDGKAHFPREGVFVSNGTHWFVTQRNFYEPQIITTDNTFVSGNCDVVIGIVNNTVYDPLQPELDSFKEELDKYFKNHTSPDVDLGDISGINASVVNIQKEIDRLNEVAKNLNESLIDLQELGKYEQYIKWPWYIWLGFIAGLIAIVMVTIMLCCMTSCCSCLKGCCSCGSCCKFDEDDSEPVLKGVKLHYT

SEQ ID NO: 86 - protein, 1273 aa, synthetic construct
  REGION 1..1273: note = RECOMBINANT SPIKE PROTEIN
MFVFLVLLPLVSSQCVNLTTRTQLPPAYTNSFTRGVYYPDKVFRSSVLHSTQDLFLPFFSNVTWFHAIHVSGTNGTKRFDNPVLPFNDGVYFASTEKSNIIRGWIFGTTLDSKTQSLLIVNNATNVVIKVCEFQFCNDPFLGVYYHKNNKSWMESEFRVYSSANNCTFEYVSQPFLMDLEGKQGNFKNLREFVFKNIDGYFKIYSKHTPINLVRDLPQGFSALEPLVDLPIGINITRFQTLLALHRSYLTPGDSSSGWTAGAAAYYVGYLQPRTFLLKYNENGTITDAVDCALDPLSETKCTLKSFTVEKGIYQTSNFRVQPTESIVRFPNITNLCPFGEVFNATRFASVYAWNRKRISNCVADYSVLYNSASFSTFKCYGVSPTKLNDLCFTNVYADSFVIRGDEVRQIAPGQTGKIADYNYKLPDDFTGCVIAWNSNNLDSKVGGNYNYLYRLFRKSNLKPFERDISTEIYQAGSTPCNGVEGFNCYFPLQSYGFQPTNGVGYQPYRVVVLSFELLHAPATVCGPKKSTNLVKNKCVNFNFNGLTGTGVLTESNKKFLPFQQFGRDIADTTDAVRDPQTLEILDITPCSFGGVSVITPGTNTSNQVAVLYQDVNCTEVPVAIHADQLTPTWRVYSTGSNVFQTRAGCLIGAEHVNNSYECDIPIGAGICASYQTQTNSPQQAQSVASQSIIAYTMSLGAENSVAYSNNSIAIPTNFTISVTTEILPVSMTKTSVDCTMYICGDSTECSNLLLQYGSFCTQLNRALTGIAVEQDKNTQEVFAQVKQIYKTPPIKDFGGFNFSQILPDPSKPSKRSFIEDLLFNKVTLADAGFIKQYGDCLGDIAARDLICAQKFNGLTVLPPLLTDEMIAQYTSALLAGTITSGWTFGAGAALQIPFAMQMAYRFNGIGVTQNVLYENQKLIANQFNSAIGKIQDSLSSTASALGKLQDVVNQNAQALNTLVKQLSSNFGAISSVLNDILSRLDPPEAEVQIDRLITGRLQSLQTYVTQQLIRAAEIRASANLAATKMSECVLGQSKRVDFCGKGYHLMSFPQSAPHGVVFLHVTYVPAQEKNFTTAPAICHDGKAHFPREGVFVSNGTHWFVTQRNFYEPQIITTDNTFVSGNCDVVIGIVNNTVYDPLQPELDSFKEELDKYFKNHTSPDVDLGDISGINASVVNIQKEIDRLNEVAKNLNESLIDLQELGKYEQYIKWPWYIWLGFIAGLIAIVMVTIMLCCMTSCCSCLKGCCSCGSCCKFDEDDSEPVLKGVKLHYT

SEQ ID NO: 87 - protein, 1260 aa, synthetic construct
  REGION 1..1260: note = RECOMBINANT SPIKE PROTEIN
QCVNLTTRTQLPPAYTNSFTRGVYYPDKVFRSSVLHSTQDLFLPFFSNVTWFHAIHVSGTNGTKRFDNPVLPFNDGVYFASTEKSNIIRGWIFGTTLDSKTQSLLIVNNATNVVIKVCEFQFCNDPFLGVYYHKNNKSWMESEFRVYSSANNCTFEYVSQPFLMDLEGKQGNFKNLREFVFKNIDGYFKIYSKHTPINLVRDLPQGFSALEPLVDLPIGINITRFQTLLALHRSYLTPGDSSSGWTAGAAAYYVGYLQPRTFLLKYNENGTITDAVDCALDPLSETKCTLKSFTVEKGIYQTSNFRVQPTESIVRFPNITNLCPFGEVFNATRFASVYAWNRKRISNCVADYSVLYNSASFSTFKCYGVSPTKLNDLCFTNVYADSFVIRGDEVRQIAPGQTGKIADYNYKLPDDFTGCVIAWNSNNLDSKVGGNYNYLYRLFRKSNLKPFERDISTEIYQAGSTPCNGVEGFNCYFPLQSYGFQPTNGVGYQPYRVVVLSFELLHAPATVCGPKKSTNLVKNKCVNFNFNGLTGTGVLTESNKKFLPFQQFGRDIADTTDAVRDPQTLEILDITPCSFGGVSVITPGTNTSNQVAVLYQDVNCTEVPVAIHADQLTPTWRVYSTGSNVFQTRAGCLIGAEHVNNSYECDIPIGAGICASYQTQTNSPQQAQSVASQSIIAYTMSLGAENSVAYSNNSIAIPTNFTISVTTEILPVSMTKTSVDCTMYICGDSTECSNLLLQYGSFCTQLNRALTGIAVEQDKNTQEVFAQVKQIYKTPPIKDFGGFNFSQILPDPSKPSKRSFIEDLLFNKVTLADAGFIKQYGDCLGDIAARDLICAQKFNGLTVLPPLLTDEMIAQYTSALLAGTITSGWTFGAGAALQIPFAMQMAYRFNGIGVTQNVLYENQKLIANQFNSAIGKIQDSLSSTASALGKLQDVVNQNAQALNTLVKQLSSNFGAISSVLNDILSRLDPPEAEVQIDRLITGRLQSLQTYVTQQLIRAAEIRASANLAATKMSECVLGQSKRVDFCGKGYHLMSFPQSAPHGVVFLHVTYVPAQEKNFTTAPAICHDGKAHFPREGVFVSNGTHWFVTQRNFYEPQIITTDNTFVSGNCDVVIGIVNNTVYDPLQPELDSFKEELDKYFKNHTSPDVDLGDISGINASVVNIQKEIDRLNEVAKNLNESLIDLQELGKYEQYIKWPWYIWLGFIAGLIAIVMVTIMLCCMTSCCSCLKGCCSCGSCCKFDEDDSEPVLKGVKLHYT

SEQ ID NO: 88 - protein, 1219 aa, synthetic construct
  REGION 1..1219: note = RECOMBINANT SPIKE PROTEIN
MFVFLVLLPLVSSQCVNLTTRTQLPPAYTNSFTRGVYYPDKVFRSSVLHSTQDLFLPFFSNVTWFHAIHVSGTNGTKRFDNPVLPFNDGVYFASTEKSNIIRGWIFGTTLDSKTQSLLIVNNATNVVIKVCEFQFCNDPFLGVYYHKNNKSWMESEFRVYSSANNCTFEYVSQPFLMDLEGKQGNFKNLREFVFKNIDGYFKIYSKHTPINLVRDLPQGFSALEPLVDLPIGINITRFQTLLALHRSYLTPGDSSSGWTAGAAAYYVGYLQPRTFLLKYNENGTITDAVDCALDPLSETKCTLKSFTVEKGIYQTSNFRVQPTESIVRFPNITNLCPFGEVFNATRFASVYAWNRKRISNCVADYSVLYNSASFSTFKCYGVSPTKLNDLCFTNVYADSFVIRGDEVRQIAPGQTGKIADYNYKLPDDFTGCVIAWNSNNLDSKVGGNYNYLYRLFRKSNLKPFERDISTEIYQAGSTPCNGVEGFNCYFPLQSYGFQPTNGVGYQPYRVVVLSFELLHAPATVCGPKKSTNLVKNKCVNFNFNGLTGTGVLTESNKKFLPFQQFGRDIADTTDAVRDPQTLEILDITPCSFGGVSVITPGTNTSNQVAVLYQDVNCTEVPVAIHADQLTPTWRVYSTGSNVFQTRAGCLIGAEHVNNSYECDIPIGAGICASYQTQTNSPQQAQSVASQSIIAYTMSLGAENSVAYSNNSIAIPTNFTISVTTEILPVSMTKTSVDCTMYICGDSTECSNLLLQYGSFCTQLNRALTGIAVEQDKNTQEVFAQVKQIYKTPPIKDFGGFNFSQILPDPSKPSKRSFIEDLLFNKVTLADAGFIKQYGDCLGDIAARDLICAQKFNGLTVLPPLLTDEMIAQYTSALLAGTITSGWTFGAGAALQIPFAMQMAYRFNGIGVTQNVLYENQKLIANQFNSAIGKIQDSLSSTASALGKLQDVVNQNAQALNTLVKQLSSNFGAISSVLNDILSRLDPPEAEVQIDRLITGRLQSLQTYVTQQLIRAAEIRASANLAATKMSECVLGQSKRVDFCGKGYHLMSFPQSAPHGVVFLHVTYVPAQEKNFTTAPAICHDGKAHFPREGVFVSNGTHWFVTQRNFYEPQIITTDNTFVSGNCDVVIGIVNNTVYDPLQPELDSFKEELDKYFKNHTSPDVDLGDISGINASVVNIQKEIDRLNEVAKNLNESLIDLQELGKYEQYIKWPHHHHHH

SEQ ID NO: 89 - protein, 1206 aa, synthetic construct
  REGION 1..1206: note = RECOMBINANT SPIKE PROTEIN
QCVNLTTRTQLPPAYTNSFTRGVYYPDKVFRSSVLHSTQDLFLPFFSNVTWFHAIHVSGTNGTKRFDNPVLPFNDGVYFASTEKSNIIRGWIFGTTLDSKTQSLLIVNNATNVVIKVCEFQFCNDPFLGVYYHKNNKSWMESEFRVYSSANNCTFEYVSQPFLMDLEGKQGNFKNLREFVFKNIDGYFKIYSKHTPINLVRDLPQGFSALEPLVDLPIGINITRFQTLLALHRSYLTPGDSSSGWTAGAAAYYVGYLQPRTFLLKYNENGTITDAVDCALDPLSETKCTLKSFTVEKGIYQTSNFRVQPTESIVRFPNITNLCPFGEVFNATRFASVYAWNRKRISNCVADYSVLYNSASFSTFKCYGVSPTKLNDLCFTNVYADSFVIRGDEVRQIAPGQTGKIADYNYKLPDDFTGCVIAWNSNNLDSKVGGNYNYLYRLFRKSNLKPFERDISTEIYQAGSTPCNGVEGFNCYFPLQSYGFQPTNGVGYQPYRVVVLSFELLHAPATVCGPKKSTNLVKNKCVNFNFNGLTGTGVLTESNKKFLPFQQFGRDIADTTDAVRDPQTLEILDITPCSFGGVSVITPGTNTSNQVAVLYQDVNCTEVPVAIHADQLTPTWRVYSTGSNVFQTRAGCLIGAEHVNNSYECDIPIGAGICASYQTQTNSPQQAQSVASQSIIAYTMSLGAENSVAYSNNSIAIPTNFTISVTTEILPVSMTKTSVDCTMYICGDSTECSNLLLQYGSFCTQLNRALTGIAVEQDKNTQEVFAQVKQIYKTPPIKDFGGFNFSQILPDPSKPSKRSFIEDLLFNKVTLADAGFIKQYGDCLGDIAARDLICAQKFNGLTVLPPLLTDEMIAQYTSALLAGTITSGWTFGAGAALQIPFAMQMAYRFNGIGVTQNVLYENQKLIANQFNSAIGKIQDSLSSTASALGKLQDVVNQNAQALNTLVKQLSSNFGAISSVLNDILSRLDPPEAEVQIDRLITGRLQSLQTYVTQQLIRAAEIRASANLAATKMSECVLGQSKRVDFCGKGYHLMSFPQSAPHGVVFLHVTYVPAQEKNFTTAPAICHDGKAHFPREGVFVSNGTHWFVTQRNFYEPQIITTDNTFVSGNCDVVIGIVNNTVYDPLQPELDSFKEELDKYFKNHTSPDVDLGDISGINASVVNIQKEIDRLNEVAKNLNESLIDLQELGKYEQYIKWPHHHHHH

SEQ ID NO: 90 - protein, 17 aa, synthetic construct
  REGION 1..17: note = Linker
SGGGSGGGSGGGSGGGS

SEQ ID NO: 91 - protein, 4 aa, synthetic construct
  REGION 1..4: note = Linker
SGGG

SEQ ID NO: 92 - protein, 4 aa, synthetic construct
  REGION 1..4: note = Linker
GGGS

SEQ ID NO: 93 - protein, 5 aa, synthetic construct
  REGION 1..5: note = Linker
GGGGS

SEQ ID NO: 94 - protein, 90 aa, synthetic construct
  REGION 1..90: note = RECOMBINANT SPIKE PROTEIN
STNLVKNKCVNFNFNGLTGTGVLTESNKKFLPFQQFGRDIADTTDAVRDPQTLEILDITPCSFGGVSVITPGTNTSNQVAVLYQDVNCTE

SEQ ID NO: 95 - DNA, 3639 bp, synthetic construct
  misc_feature 1..3639: note = RECOMBINANT SPIKE PROTEIN
  source 1..3639: mol_type = other DNA
atgttcgtcttcctggtgctgctgcccctggtgtccagccagtgcgtgaacctgaccactaggactcagctgcctcccgcttacaccaactcattcactcgcggtgtgtactaccctgacaaggtcttccgttcttcagtgctgcactcaactcaggacctgttcctgcccttcttctccaacgtcacctggttccacgccatccacgtgtccggcaccaacggcactaagcgcttcgacaacccagtgctgcctttcaacgacggtgtctacttcgcttcaaccgagaagtccaacatcatccgtggatggatcttcggcaccactctggacagcaagactcagtctctgctgatcgtcaacaacgccaccaacgtggtcatcaaggtctgcgaattccagttctgcaacgacccattcctgggcgtctactaccacaagaacaacaagtcatggatggagtccgaattccgcgtctactccagcgctaacaactgcactttcgagtacgtgtcccagcctttcctgatggacctggaaggaaagcagggtaacttcaagaacctgagggagttcgtgttcaagaacatcgacggatacttcaagatttacagcaagcacaccccaatcaacctggtgcgcgacctgcctcagggtttctctgctctggagccactggtggacctgcctatcggcatcaacatcacccgcttccagactctgctggctctgcaccgttcctacctgactccaggcgactcatcttctggatggactgctggagctgctgcttactacgtgggctacctgcagcctcgcaccttcctgctgaagtacaacgaaaacggaaccatcactgacgccgtcgactgcgctctggaccctctgtcagaaaccaagtgcactctgaagtccttcaccgtggagaagggcatctaccagacttcaaacttcagggtgcagcccaccgaatccatcgtcagattccctaacatcactaacctgtgccccttcggagaggtcttcaacgccacccgcttcgcttccgtgtacgcctggaacaggaagagaatctcaaactgcgtcgctgactactccgtgctgtacaactcagcctccttcagcaccttcaagtgctacggcgtgtcaccaactaagctgaacgacctgtgcttcaccaacgtctacgccgactccttcgtgatcaggggagacgaggtcagacagatcgctcctggccagactggaaagatcgccgactacaactacaagctgcccgacgacttcaccggttgcgtcatcgcttggaacagcaacaacctggactctaaagtgggtggcaactacaactacctgtaccgcctgttccgtaagtcaaacctgaagccattcgagagggacatcagcactgaaatctaccaggccggatctaccccttgcaacggtgtcgagggcttcaactgctacttccccctgcagtcctacggtttccagccaactaacggtgtgggctaccagccttacagagtggtcgtgctgagcttcgaactgctccacgctcctgctactgtgtgcggtccaaagaagtctaccaacctggtcaagaacaagtgcgtgaacttcaacttcaacggcctgaccggaactggtgtcctgaccgagagcaacaagaagttcctgcccttccagcagttcggaagggacatcgctgacaccactgacgctgtgcgcgaccctcagaccctggaaatcctggacatcactccatgctcattcggaggtgtctccgtgatcacccctggcaccaacacttctaaccaggtcgctgtgctgtaccaggacgtcaactgcaccgaggtccctgtggccatccacgctgaccagctgacccccacttggcgcgtgtactccaccggcagcaacgtgttccagactcgtgctggttgcctgatcggcgccgagcacgtgaacaacagctacgaatgcgacatccccatcggcgctggaatctgcgcctcttaccagacccagactaacagcccacgcagggctcgctctgtggcctctcagtcaatcatcgcttacaccatgtcactgggcgctgaaaactccgtggcctactctaacaactcaatcgccatccccaccaacttcactatcagcgtgaccactgagatcctgccagtcagcatgaccaagacttctgtggactgcactatgtacatctgcggagacagcaccgaatgctctaacctgctgctgcagtacggctctttctgcacccagctgaaccgtgctctgactggaatcgccgtggagcaggacaagaacactcaggaagtcttcgctcaggtgaagcaaatctacaagaccccacctatcaaggacttcggcggattcaacttctcccagatcctgcctgacccctccaagccaagcaagcgctctttcatcgaggacctgctgttcaacaaggtcactctggccgacgctggattcatcaagcagtacggagactgcctgggtgacatcgccgctcgtgacctgatctgcgctcagaagttcaacggtctgaccgtgctgcccccactgctgactgacgaaatgatcgcccagtacactagcgccctgctggctggaaccatcacttctggttggaccttcggtgctggcgccgctctgcagatccctttcgctatgcagatggcctaccgtttcaacggaatcggtgtcacccagaacgtgctgtacgagaaccagaagctgatcgctaaccagttcaactcagccatcggaaagatccaggacagcctgagctctactgcctctgctctgggcaagctgcaggacgtcgtgaaccagaacgcccaggctctgaacaccctggtcaagcagctgtcatccaacttcggtgctatcagctctgtgctgaacgacatcctgtcccgcctggacaaggtcgaggccgaagtgcagatcgaccgcctgatcactggccgtctgcagtcactgcagacctacgtgactcagcagctgatcagggccgctgaaatcagagcctccgctaacctggccgctaccaagatgagcgagtgcgtcctgggtcaatctaagcgtgtggacttctgcggcaagggataccacctgatgtcattccctcagtctgctccccacggtgtggtgttcctgcacgtcacctacgtgccagcccaggagaagaacttcaccactgcccctgctatctgccacgacggcaaggctcacttccccagggaaggtgtcttcgtgagcaacggcacccactggttcgtcactcagagaaacttctacgagccacagatcatcaccactgacaacactttcgtgtctggaaactgcgacgtggtcatcggtatcgtcaacaacaccgtgtacgaccccctgcagccagagctggactcattcaaggaggaactggacaagtacttcaagaaccacacctcccctgacgtcgacctgggcgacatctcaggaatcaacgcttccgtcgtgaacatccagaaggagatcgaccgcctgaacgaagtggccaagaacctgaacgaaagcctgatcgacctgcaggagctgggcaagtacgaacagtacatcaagtggcct

SEQ ID NO: 96 - DNA, 3822 bp, synthetic construct
  misc_feature 1..3822: note = RECOMBINANT SPIKE PROTEIN
  source 1..3822: mol_type = other DNA
atgttcgtcttcctggtgctgctgcccctggtgtccagccagtgcgtgaacctgaccactaggactcagctgcctcccgcttacaccaactcattcactcgcggtgtgtactaccctgacaaggtcttccgttcttcagtgctgcactcaactcaggacctgttcctgcccttcttctccaacgtcacctggttccacgccatccacgtgtccggcaccaacggcactaagcgcttcgacaacccagtgctgcctttcaacgacggtgtctacttcgcttcaaccgagaagtccaacatcatccgtggatggatcttcggcaccactctggacagcaagactcagtctctgctgatcgtcaacaacgccaccaacgtggtcatcaaggtctgcgaattccagttctgcaacgacccattcctgggcgtctactaccacaagaacaacaagtcatggatggagtccgaattccgcgtctactccagcgctaacaactgcactttcgagtacgtgtcccagcctttcctgatggacctggaaggaaagcagggtaacttcaagaacctgagggagttcgtgttcaagaacatcgacggatacttcaagatttacagcaagcacaccccaatcaacctggtgcgcgacctgcctcagggtttctctgctctggagccactggtggacctgcctatcggcatcaacatcacccgcttccagactctgctggctctgcaccgttcctacctgactccaggcgactcatcttctggatggactgctggagctgctgcttactacgtgggctacctgcagcctcgcaccttcctgctgaagtacaacgaaaacggaaccatcactgacgccgtcgactgcgctctggaccctctgtcagaaaccaagtgcactctgaagtccttcaccgtggagaagggcatctaccagacttcaaacttcagggtgcagcccaccgaatccatcgtcagattccctaacatcactaacctgtgccccttcggagaggtcttcaacgccacccgcttcgcttccgtgtacgcctggaacaggaagagaatctcaaactgcgtcgctgactactccgtgctgtacaactcagcctccttcagcaccttcaagtgctacggcgtgtcaccaactaagctgaacgacctgtgcttcaccaacgtctacgccgactccttcgtgatcaggggagacgaggtcagacagatcgctcctggccagactggaaagatcgccgactacaactacaagctgcccgacgacttcaccggttgcgtcatcgcttggaacagcaacaacctggactctaaagtgggtggcaactacaactacctgtaccgcctgttccgtaagtcaaacctgaagccattcgagagggacatcagcactgaaatctaccaggccggatctaccccttgcaacggtgtcgagggcttcaactgctacttccccctgcagtcctacggtttccagccaactaacggtgtgggctaccagccttacagagtggtcgtgctgagcttcgaactgctccacgctcctgctactgtgtgcggtccaaagaagtctaccaacctggtcaagaacaagtgcgtgaacttcaacttcaacggcctgaccggaactggtgtcctgaccgagagcaacaagaagttcctgcccttccagcagttcggaagggacatcgctgacaccactgacgctgtgcgcgaccctcagaccctggaaatcctggacatcactccatgctcattcggaggtgtctccgtgatcacccctggcaccaacacttctaaccaggtcgctgtgctgtaccaggacgtcaactgcaccgaggtccctgtggccatccacgctgaccagctgacccccacttggcgcgtgtactccaccggcagcaacgtgttccagactcgtgctggttgcctgatcggcgccgagcacgtgaacaacagctacgaatgcgacatccccatcggcgctggaatctgcgcctcttaccagacccagactaacagcccacagcaggctcagtctgtggcctctcagtcaatcatcgcttacaccatgtcactgggcgctgaaaactccgtggcctactctaacaactcaatcgccatccccaccaacttcactatcagcgtgaccactgagatcctgccagtcagcatgaccaagacttctgtggactgcactatgtacatctgcggagacagcaccgaatgctctaacctgctgctgcagtacggctctttctgcacccagctgaaccgtgctctgactggaatcgccgtggagcaggacaagaacactcaggaagtcttcgctcaggtgaagcaaatctacaagaccccacctatcaaggacttcggcggattcaacttctcccagatcctgcctgacccctccaagccaagcaagcgctctttcatcgaggacctgctgttcaacaaggtcactctggccgacgctggattcatcaagcagtacggagactgcctgggtgacatcgccgctcgtgacctgatctgcgctcagaagttcaacggtctgaccgtgctgcccccactgctgactgacgaaatgatcgcccagtacactagcgccctgctggctggaaccatcacttctggttggaccttcggtgctggcgccgctctgcagatccctttcgctatgcagatggcctaccgtttcaacggaatcggtgtcacccagaacgtgctgtacgagaaccagaagctgatcgctaaccagttcaactcagccatcggaaagatccaggacagcctgagctctactgcctctgctctgggcaagctgcaggacgtcgtgaaccagaacgcccaggctctgaacaccctggtcaagcagctgtcatccaacttcggtgctatcagctctgtgctgaacgacatcctgtcccgcctggaccctcccgaggccgaagtgcagatcgaccgcctgatcactggccgtctgcagtcactgcagacctacgtgactcagcagctgatcagggccgctgaaatcagagcctccgctaacctggccgctaccaagatgagcgagtgcgtcctgggtcaatctaagcgtgtggacttctgcggcaagggataccacctgatgtcattccctcagtctgctccccacggtgtggtgttcctgcacgtcacctacgtgccagcccaggagaagaacttcaccactgcccctgctatctgccacgacggcaaggctcacttccccagggaaggtgtcttcgtgagcaacggcacccactggttcgtcactcagagaaacttctacgagccacagatcatcaccactgacaacactttcgtgtctggaaactgcgacgtggtcatcggtatcgtcaacaacaccgtgtacgaccccctgcagccagagctggactcattcaaggaggaactggacaagtacttcaagaaccacacctcccctgacgtcgacctgggcgacatctcaggaatcaacgcttccgtcgtgaacatccagaaggagatcgaccgcctgaacgaagtggccaagaacctgaacgaaagcctgatcgacctgcaggagctgggcaagtacgaacagtacatcaagtggccttggtacatctggctgggtttcatcgctggcctcatcgctatcgtgatggtgaccatcatgctgtgctgcatgacttcatgctgctcctgcctgaagggctgctgcagctgcggatcttgctgcaagttcgacgaggacgactctgaacccgtcctgaagggcgtgaagctgcactacacctaa

SEQ ID NO: 97 - protein, 4 aa, synthetic construct
  REGION 1..4: note = Recombinant Furin Cleavage Site
GSAS

SEQ ID NO: 98 - protein, 8 aa, synthetic construct
  REGION 1..8: note = HRV3C Cleavage Site
LEVLFQGP

SEQ ID NO: 99 - protein, 8 aa, synthetic construct
  REGION 1..8: note = Strep-tag
WSHPQFEK

SEQ ID NO: 100 - protein, 6 aa, synthetic construct
  REGION 1..6: note = 6X-His Tag
HHHHHH

SEQ ID NO: 101 - protein, 10 aa, synthetic construct
  REGION 1..10: note = His-Tag
  SITE 6: note = May be present or absent
  SITE 7: note = May be present or absent
  SITE 8: note = May be present or absent
  SITE 9: note = May be present or absent
  SITE 10: note = May be present or absent
HHHHHHHHHH

SEQ ID NO: 102 - protein, 8 aa, synthetic construct
  REGION 1..8: note = 8X-His Tag
HHHHHHHH

SEQ ID NO: 103 - protein, 30 aa, synthetic construct
  REGION 1..30: note = FOLDON
GYIPEAPRDGQAYVRKDGEWVLLSTFLSPA

SEQ ID NO: 104 - protein, 10 aa, synthetic construct
  REGION 1..10: note = RECOMBINANT SPIKE PROTEIN
EDLLFNKVTL

SEQ ID NO: 105 - protein, 1263 aa, synthetic construct
  REGION 1..1263: note = RECOMBINANT SPIKE PROTEIN
MFVFLVLLPLVSSQCVNLTTRTQLPPAYTNSFTRGVYYPDKVFRSSVLHSTQDLFLPFFSNVTWFHAIHVSGTNGTKRFDNPVLPFNDGVYFASTEKSNIIRGWIFGTTLDSKTQSLLIVNNATNVVIKVCEFQFCNDPFLGVYYHKNNKSWMESEFRVYSSANNCTFEYVSQPFLMDLEGKQGNFKNLREFVFKNIDGYFKIYSKHTPINLVRDLPQGFSALEPLVDLPIGINITRFQTLLALHRSYLTPGDSSSGWTAGAAAYYVGYLQPRTFLLKYNENGTITDAVDCALDPLSETKCTLKSFTVEKGIYQTSNFRVQPTESIVRFPNITNLCPFGEVFNATRFASVYAWNRKRISNCVADYSVLYNSASFSTFKCYGVSPTKLNDLCFTNVYADSFVIRGDEVRQIAPGQTGKIADYNYKLPDDFTGCVIAWNSNNLDSKVGGNYNYLYRLFRKSNLKPFERDISTEIYQAGSTPCNGVEGFNCYFPLQSYGFQPTNGVGYQPYRVVVLSFELLHAPATVCGPKKSTNLVKNKCVNFNFNGLTGTGVLTESNKKFLPFQQFGRDIADTTDAVRDPQTLEILDITPCSFGGVSVITPGTNTSNQVAVLYQDVNCTEVPVAIHADQLTPTWRVYSTGSNVFQTRAGCLIGAEHVNNSYECDIPIGAGICASYQTQTNSPQQAQSVASQSIIAYTMSLGAENSVAYSNNSIAIPTNFTISVTTEILPVSMTKTSVDCTMYICGDSTECSNLLLQYGSFCTQLNRALTGIAVEQDKNTQEVFAQVKQIYKTPPIKDFGGFNFSQILPDPSKPSKRSFIADAGFIKQYGDCLGDIAARDLICAQKFNGLTVLPPLLTDEMIAQYTSALLAGTITSGWTFGAGAALQIPFAMQMAYRFNGIGVTQNVLYENQKLIANQFNSAIGKIQDSLSSTASALGKLQDVVNQNAQALNTLVKQLSSNFGAISSVLNDILSRLDPPEAEVQIDRLITGRLQSLQTYVTQQLIRAAEIRASANLAATKMSECVLGQSKRVDFCGKGYHLMSFPQSAPHGVVFLHVTYVPAQEKNFTTAPAICHDGKAHFPREGVFVSNGTHWFVTQRNFYEPQIITTDNTFVSGNCDVVIGIVNNTVYDPLQPELDSFKEELDKYFKNHTSPDVDLGDISGINASVVNIQKEIDRLNEVAKNLNESLIDLQELGKYEQYIKWPWYIWLGFIAGLIAIVMVTIMLCCMTSCCSCLKGCCSCGSCCKFDEDDSEPVLKGVKLHYT

SEQ ID NO: 106 - protein, 1250 aa, synthetic construct
  REGION 1..1250: note = RECOMBINANT SPIKE PROTEIN
QCVNLTTRTQLPPAYTNSFTRGVYYPDKVFRSSVLHSTQDLFLPFFSNVTWFHAIHVSGTNGTKRFDNPVLPFNDGVYFASTEKSNIIRGWIFGTTLDSKTQSLLIVNNATNVVIKVCEFQFCNDPFLGVYYHKNNKSWMESEFRVYSSANNCTFEYVSQPFLMDLEGKQGNFKNLREFVFKNIDGYFKIYSKHTPINLVRDLPQGFSALEPLVDLPIGINITRFQTLLALHRSYLTPGDSSSGWTAGAAAYYVGYLQPRTFLLKYNENGTITDAVDCALDPLSETKCTLKSFTVEKGIYQTSNFRVQPTESIVRFPNITNLCPFGEVFNATRFASVYAWNRKRISNCVADYSVLYNSASFSTFKCYGVSPTKLNDLCFTNVYADSFVIRGDEVRQIAPGQTGKIADYNYKLPDDFTGCVIAWNSNNLDSKVGGNYNYLYRLFRKSNLKPFERDISTEIYQAGSTPCNGVEGFNCYFPLQSYGFQPTNGVGYQPYRVVVLSFELLHAPATVCGPKKSTNLVKNKCVNFNFNGLTGTGVLTESNKKFLPFQQFGRDIADTTDAVRDPQTLEILDITPCSFGGVSVITPGTNTSNQVAVLYQDVNCTEVPVAIHADQLTPTWRVYSTGSNVFQTRAGCLIGAEHVNNSYECDIPIGAGICASYQTQTNSPQQAQSVASQSIIAYTMSLGAENSVAYSNNSIAIPTNFTISVTTEILPVSMTKTSVDCTMYICGDSTECSNLLLQYGSFCTQLNRALTGIAVEQDKNTQEVFAQVKQIYKTPPIKDFGGFNFSQILPDPSKPSKRSFIADAGFIKQYGDCLGDIAARDLICAQKFNGLTVLPPLLTDEMIAQYTSALLAGTITSGWTFGAGAALQIPFAMQMAYRFNGIGVTQNVLYENQKLIANQFNSAIGKIQDSLSSTASALGKLQDVVNQNAQALNTLVKQLSSNFGAISSVLNDILSRLDPPEAEVQIDRLITGRLQSLQTYVTQQLIRAAEIRASANLAATKMSECVLGQSKRVDFCGKGYHLMSFPQSAPHGVVFLHVTYVPAQEKNFTTAPAICHDGKAHFPREGVFVSNGTHWFVTQRNFYEPQIITTDNTFVSGNCDVVIGIVNNTVYDPLQPELDSFKEELDKYFKNHTSPDVDLGDISGINASVVNIQKEIDRLNEVAKNLNESLIDLQELGKYEQYIKWPWYIWLGFIAGLIAIVMVTIMLCCMTSCCSCLKGCCSCGSCCKFDEDDSEPVLKGVKLHYT

SEQ ID NO: 107 - protein, 1263 aa, synthetic construct
  REGION 1..1263: note = RECOMBINANT SPIKE PROTEIN
MFVFLVLLPLVSSQCVNLTTRTQLPPAYTNSFTRGVYYPDKVFRSSVLHSTQDLFLPFFSNVTWFHAIHVSGTNGTKRFDNPVLPFNDGVYFASTEKSNIIRGWIFGTTLDSKTQSLLIVNNATNVVIKVCEFQFCNDPFLGVYYHKNNKSWMESEFRVYSSANNCTFEYVSQPFLMDLEGKQGNFKNLREFVFKNIDGYFKIYSKHTPINLVRDLPQGFSALEPLVDLPIGINITRFQTLLALHRSYLTPGDSSSGWTAGAAAYYVGYLQPRTFLLKYNENGTITDAVDCALDPLSETKCTLKSFTVEKGIYQTSNFRVQPTESIVRFPNITNLCPFGEVFNATRFASVYAWNRKRISNCVADYSVLYNSASFSTFKCYGVSPTKLNDLCFTNVYADSFVIRGDEVRQIAPGQTGKIADYNYKLPDDFTGCVIAWNSNNLDSKVGGNYNYLYRLFRKSNLKPFERDISTEIYQAGSTPCNGVEGFNCYFPLQSYGFQPTNGVGYQPYRVVVLSFELLHAPATVCGPKKSTNLVKNKCVNFNFNGLTGTGVLTESNKKFLPFQQFGRDIADTTDAVRDPQTLEILDITPCSFGGVSVITPGTNTSNQVAVLYQDVNCTEVPVAIHADQLTPTWRVYSTGSNVFQTRAGCLIGAEHVNNSYECDIPIGAGICASYQTQTNSPRRARSVASQSIIAYTMSLGAENSVAYSNNSIAIPTNFTISVTTEILPVSMTKTSVDCTMYICGDSTECSNLLLQYGSFCTQLNRALTGIAVEQDKNTQEVFAQVKQIYKTPPIKDFGGFNFSQILPDPSKPSKRSFIADAGFIKQYGDCLGDIAARDLICAQKFNGLTVLPPLLTDEMIAQYTSALLAGTITSGWTFGAGAALQIPFAMQMAYRFNGIGVTQNVLYENQKLIANQFNSAIGKIQDSLSSTASALGKLQDVVNQNAQALNTLVKQLSSNFGAISSVLNDILSRLDKVEAEVQIDRLITGRLQSLQTYVTQQLIRAAEIRASANLAATKMSECVLGQSKRVDFCGKGYHLMSFPQSAPHGVVFLHVTYVPAQEKNFTTAPAICHDGKAHFPREGVFVSNGTHWFVTQRNFYEPQIITTDNTFVSGNCDVVIGIVNNTVYDPLQPELDSFKEELDKYFKNHTSPDVDLGDISGINASVVNIQKEIDRLNEVAKNLNESLIDLQELGKYEQYIKWPWYIWLGFIAGLIAIVMVTIMLCCMTSCCSCLKGCCSCGSCCKFDEDDSEPVLKGVKLHYT

SEQ ID NO: 108 - protein, 1250 aa, synthetic construct
  REGION 1..1250: note = RECOMBINANT SPIKE PROTEIN
QCVNLTTRTQLPPAYTNSFTRGVYYPDKVFRSSVLHSTQDLFLPFFSNVTWFHAIHVSGTNGTKRFDNPVLPFNDGVYFASTEKSNIIRGWIFGTTLDSKTQSLLIVNNATNVVIKVCEFQFCNDPFLGVYYHKNNKSWMESEFRVYSSANNCTFEYVSQPFLMDLEGKQGNFKNLREFVFKNIDGYFKIYSKHTPINLVRDLPQGFSALEPLVDLPIGINITRFQTLLALHRSYLTPGDSSSGWTAGAAAYYVGYLQPRTFLLKYNENGTITDAVDCALDPLSETKCTLKSFTVEKGIYQTSNFRVQPTESIVRFPNITNLCPFGEVFNATRFASVYAWNRKRISNCVADYSVLYNSASFSTFKCYGVSPTKLNDLCFTNVYADSFVIRGDEVRQIAPGQTGKIADYNYKLPDDFTGCVIAWNSNNLDSKVGGNYNYLYRLFRKSNLKPFERDISTEIYQAGSTPCNGVEGFNCYFPLQSYGFQPTNGVGYQPYRVVVLSFELLHAPATVCGPKKSTNLVKNKCVNFNFNGLTGTGVLTESNKKFLPFQQFGRDIADTTDAVRDPQTLEILDITPCSFGGVSVITPGTNTSNQVAVLYQDVNCTEVPVAIHADQLTPTWRVYSTGSNVFQTRAGCLIGAEHVNNSYECDIPIGAGICASYQTQTNSPRRARSVASQSIIAYTMSLGAENSVAYSNNSIAIPTNFTISVTTEILPVSMTKTSVDCTMYICGDSTECSNLLLQYGSFCTQLNRALTGIAVEQDKNTQEVFAQVKQIYKTPPIKDFGGFNFSQILPDPSKPSKRSFIADAGFIKQYGDCLGDIAARDLICAQKFNGLTVLPPLLTDEMIAQYTSALLAGTITSGWTFGAGAALQIPFAMQMAYRFNGIGVTQNVLYENQKLIANQFNSAIGKIQDSLSSTASALGKLQDVVNQNAQALNTLVKQLSSNFGAISSVLNDILSRLDKVEAEVQIDRLITGRLQSLQTYVTQQLIRAAEIRASANLAATKMSECVLGQSKRVDFCGKGYHLMSFPQSAPHGVVFLHVTYVPAQEKNFTTAPAICHDGKAHFPREGVFVSNGTHWFVTQRNFYEPQIITTDNTFVSGNCDVVIGIVNNTVYDPLQPELDSFKEELDKYFKNHTSPDVDLGDISGINASVVNIQKEIDRLNEVAKNLNESLIDLQELGKYEQYIKWPWYIWLGFIAGLIAIVMVTIMLCCMTSCCSCLKGCCSCGSCCKFDEDDSEPVLKGVKLHYT

SEQ ID NO: 109 - protein, 1273 aa, synthetic construct
  REGION 1..1273: note = Recombinant CoV S polypeptide
MFVFLVLLPLVSSQCVNLTTRTQLPPAYTNSFTRGVYYPDKVFRSSVLHSTQDLFLPFFSNVTWFHAIHVSGTNGTKRFDNPVLPFNDGVYFASTEKSNIIRGWIFGTTLDSKTQSLLIVNNATNVVIKVCEFQFCNDPFLGVYYHKNNKSWMESEFRVYSSANNCTFEYVSQPFLMDLEGKQGNFKNLREFVFKNIDGYFKIYSKHTPINLVRDLPQGFSALEPLVDLPIGINITRFQTLLALHRSYLTPGDSSSGWTAGAAAYYVGYLQPRTFLLKYNENGTITDAVDCALDPLSETKCTLKSFTVEKGIYQTSNFRVQPTESIVRFPNITNLCPFGEVFNATRFASVYAWNRKRISNCVADYSVLYNSASFSTFKCYGVSPTKLNDLCFTNVYADSFVIRGDEVRQIAPGQTGKIADYNYKLPDDFTGCVIAWNSNNLDSKVGGNYNYLYRLFRKSNLKPFERDISTEIYQAGSTPCNGVEGFNCYFPLQSYGFQPTNGVGYQPYRVVVLSFELLHAPATVCGPKKSTNLVKNKCVNFNFNGLTGTGVLTESNKKFLPFQQFGRDIADTTDAVRDPQTLEILDITPCSFGGVSVITPGTNTSNQVAVLYQDVNCTEVPVAIHADQLTPTWRVYSTGSNVFQTRAGCLIGAEHVNNSYECDIPIGAGICASYQTQTNSPGSASSVASQSIIAYTMSLGAENSVAYSNNSIAIPTNFTISVTTEILPVSMTKTSVDCTMYICGDSTECSNLLLQYGSFCTQLNRALTGIAVEQDKNTQEVFAQVKQIYKTPPIKDFGGFNFSQILPDPSKPSKRSFIEDLLFNKVTLADAGFIKQYGDCLGDIAARDLICAQKFNGLTVLPPLLTDEMIAQYTSALLAGTITSGWTFGAGAALQIPFAMQMAYRFNGIGVTQNVLYENQKLIANQFNSAIGKIQDSLSSTASALGKLQDVVNQNAQALNTLVKQLSSNFGAISSVLNDILSRLDPPEAEVQIDRLITGRLQSLQTYVTQQLIRAAEIRASANLAATKMSECVLGQSKRVDFCGKGYHLMSFPQSAPHGVVFLHVTYVPAQEKNFTTAPAICHDGKAHFPREGVFVSNGTHWFVTQRNFYEPQIITTDNTFVSGNCDVVIGIVNNTVYDPLQPELDSFKEELDKYFKNHTSPDVDLGDISGINASVVNIQKEIDRLNEVAKNLNESLIDLQELGKYEQYIKWPWYIWLGFIAGLIAIVMVTIMLCCMTSCCSCLKGCCSCGSCCKFDEDDSEPVLKGVKLHYT

SEQ ID NO: 110 - protein, 1260 aa, synthetic construct
  REGION 1..1260: note = Recombinant CoV S polypeptide
QCVNLTTRTQLPPAYTNSFTRGVYYPDKVFRSSVLHSTQDLFLPFFSNVTWFHAIHVSGTNGTKRFDNPVLPFNDGVYFASTEKSNIIRGWIFGTTLDSKTQSLLIVNNATNVVIKVCEFQFCNDPFLGVYYHKNNKSWMESEFRVYSSANNCTFEYVSQPFLMDLEGKQGNFKNLREFVFKNIDGYFKIYSKHTPINLVRDLPQGFSALEPLVDLPIGINITRFQTLLALHRSYLTPGDSSSGWTAGAAAYYVGYLQPRTFLLKYNENGTITDAVDCALDPLSETKCTLKSFTVEKGIYQTSNFRVQPTESIVRFPNITNLCPFGEVFNATRFASVYAWNRKRISNCVADYSVLYNSASFSTFKCYGVSPTKLNDLCFTNVYADSFVIRGDEVRQIAPGQTGKIADYNYKLPDDFTGCVIAWNSNNLDSKVGGNYNYLYRLFRKSNLKPFERDISTEIYQAGSTPCNGVEGFNCYFPLQSYGFQPTNGVGYQPYRVVVLSFELLHAPATVCGPKKSTNLVKNKCVNFNFNGLTGTGVLTESNKKFLPFQQFGRDIADTTDAVRDPQTLEILDITPCSFGGVSVITPGTNTSNQVAVLYQDVNCTEVPVAIHADQLTPTWRVYSTGSNVFQTRAGCLIGAEHVNNSYECDIPIGAGICASYQTQTNSPGSASSVASQSIIAYTMSLGAENSVAYSNNSIAIPTNFTISVTTEILPVSMTKTSVDCTMYICGDSTECSNLLLQYGSFCTQLNRALTGIAVEQDKNTQEVFAQVKQIYKTPPIKDFGGFNFSQILPDPSKPSKRSFIEDLLFNKVTLADAGFIKQYGDCLGDIAARDLICAQKFNGLTVLPPLLTDEMIAQYTSALLAGTITSGWTFGAGAALQIPFAMQMAYRFNGIGVTQNVLYENQKLIANQFNSAIGKIQDSLSSTASALGKLQDVVNQNAQALNTLVKQLSSNFGAISSVLNDILSRLDPPEAEVQIDRLITGRLQSLQTYVTQQLIRAAEIRASANLAATKMSECVLGQSKRVDFCGKGYHLMSFPQSAPHGVVFLHVTYVPAQEKNFTTAPAICHDGKAHFPREGVFVSNGTHWFVTQRNFYEPQIITTDNTFVSGNCDVVIGIVNNTVYDPLQPELDSFKEELDKYFKNHTSPDVDLGDISGINASVVNIQKEIDRLNEVAKNLNESLIDLQELGKYEQYIKWPWYIWLGFIAGLIAIVMVTIMLCCMTSCCSCLKGCCSCGSCCKFDEDDSEPVLKGVKLHYT

SEQ ID NO: 111 - protein, 4 aa, synthetic construct
  REGION 1..4: note = Recombinant Furin Cleavage Site
GSGA

SEQ ID NO: 112 - protein, 1260 aa, synthetic construct
  REGION 1..1260: note = Recombinant SARS-CoV-2 spike protein
QCVNLTTRTQLPPAYTNSFTRGVYYPDKVFRSSVLHSTQDLFLPFFSNVTWFHAIHVSGTNGTKRFDNPVLPFNDGVYFASTEKSNIIRGWIFGTTLDSKTQSLLIVNNATNVVIKVCEFQFCNDPFLGVYYHKNNKSWMESEFRVYSSANNCTFEYVSQPFLMDLEGKQGNFKNLREFVFKNIDGYFKIYSKHTPINLVRDLPQGFSALEPLVDLPIGINITRFQTLLALHRSYLTPGDSSSGWTAGAAAYYVGYLQPRTFLLKYNENGTITDAVDCALDPLSETKCTLKSFTVEKGIYQTSNFRVQPTESIVRFPNITNLCPFGEVFNATRFASVYAWNRKRISNCVADYSVLYNSASFSTFKCYGVSPTKLNDLCFTNVYADSFVIRGDEVRQIAPGQTGKIADYNYKLPDDFTGCVIAWNSNNLDSKVGGNYNYLYRLFRKSNLKPFERDISTEIYQAGSTPCNGVEGFNCYFPLQSYGFQPTYGVGYQPYRVVVLSFELLHAPATVCGPKKSTNLVKNKCVNFNFNGLTGTGVLTESNKKFLPFQQFGRDIADTTDAVRDPQTLEILDITPCSFGGVSVITPGTNTSNQVAVLYQDVNCTEVPVAIHADQLTPTWRVYSTGSNVFQTRAGCLIGAEHVNNSYECDIPIGAGICASYQTQTNSPQQAQSVASQSIIAYTMSLGAENSVAYSNNSIAIPTNFTISVTTEILPVSMTKTSVDCTMYICGDSTECSNLLLQYGSFCTQLNRALTGIAVEQDKNTQEVFAQVKQIYKTPPIKDFGGFNFSQILPDPSKPSKRSFIEDLLFNKVTLADAGFIKQYGDCLGDIAARDLICAQKFNGLTVLPPLLTDEMIAQYTSALLAGTITSGWTFGAGAALQIPFAMQMAYRFNGIGVTQNVLYENQKLIANQFNSAIGKIQDSLSSTASALGKLQDVVNQNAQALNTLVKQLSSNFGAISSVLNDILSRLDPPEAEVQIDRLITGRLQSLQTYVTQQLIRAAEIRASANLAATKMSECVLGQSKRVDFCGKGYHLMSFPQSAPHGVVFLHVTYVPAQEKNFTTAPAICHDGKAHFPREGVFVSNGTHWFVTQRNFYEPQIITTDNTFVSGNCDVVIGIVNNTVYDPLQPELDSFKEELDKYFKNHTSPDVDLGDISGINASVVNIQKEIDRLNEVAKNLNESLIDLQELGKYEQYIKWPWYIWLGFIAGLIAIVMVTIMLCCMTSCCSCLKGCCSCGSCCKFDEDDSEPVLKGVKLHYT

SEQ ID NO: 113 - protein, 1260 aa, synthetic construct
  REGION 1..1260: note = Recombinant SARS-CoV-2 spike protein
QCVNLTTRTQLPPAYTNSFTRGVYYPDKVFRSSVLHSTQDLFLPFFSNVTWFHAIHVSGTNGTKRFDNPVLPFNDGVYFASTEKSNIIRGWIFGTTLDSKTQSLLIVNNATNVVIKVCEFQFCNDPFLGVYYHKNNKSWMESEFRVYSSANNCTFEYVSQPFLMDLEGKQGNFKNLREFVFKNIDGYFKIYSKHTPINLVRDLPQGFSALEPLVDLPIGINITRFQTLLALHRSYLTPGDSSSGWTAGAAAYYVGYLQPRTFLLKYNENGTITDAVDCALDPLSETKCTLKSFTVEKGIYQTSNFRVQPTESIVRFPNITNLCPFGEVFNATRFASVYAWNRKRISNCVADYSVLYNSASFSTFKCYGVSPTKLNDLCFTNVYADSFVIRGDEVRQIAPGQTGKIADYNYKLPDDFTGCVIAWNSNNLDSKVGGNYNYLYRLFRKSNLKPFERDISTEIYQAGSTPCNGVEGFNCYFPLQSYGFQPTYGVGYQPYRVVVLSFELLHAPATVCGPKKSTNLVKNKCVNFNFNGLTGTGVLTESNKKFLPFQQFGRDIADTTDAVRDPQTLEILDITPCSFGGVSVITPGTNTSNQVAVLYQGVNCTEVPVAIHADQLTPTWRVYSTGSNVFQTRAGCLIGAEHVNNSYECDIPIGAGICASYQTQTNSPQQAQSVASQSIIAYTMSLGAENSVAYSNNSIAIPTNFTISVTTEILPVSMTKTSVDCTMYICGDSTECSNLLLQYGSFCTQLNRALTGIAVEQDKNTQEVFAQVKQIYKTPPIKDFGGFNFSQILPDPSKPSKRSFIEDLLFNKVTLADAGFIKQYGDCLGDIAARDLICAQKFNGLTVLPPLLTDEMIAQYTSALLAGTITSGWTFGAGAALQIPFAMQMAYRFNGIGVTQNVLYENQKLIANQFNSAIGKIQDSLSSTASALGKLQDVVNQNAQALNTLVKQLSSNFGAISSVLNDILSRLDPPEAEVQIDRLITGRLQSLQTYVTQQLIRAAEIRASANLAATKMSECVLGQSKRVDFCGKGYHLMSFPQSAPHGVVFLHVTYVPAQEKNFTTAPAICHDGKAHFPREGVFVSNGTHWFVTQRNFYEPQIITTDNTFVSGNCDVVIGIVNNTVYDPLQPELDSFKEELDKYFKNHTSPDVDLGDISGINASVVNIQKEIDRLNEVAKNLNESLIDLQELGKYEQYIKWPWYIWLGFIAGLIAIVMVTIMLCCMTSCCSCLKGCCSCGSCCKFDEDDSEPVLKGVKLHYT

SEQ ID NO: 114 - protein, 1257 aa, synthetic construct
  REGION 1..1257: note = Recombinant SARS-CoV-2 spike protein
QCVNLTTRTQLPPAYTNSFTRGVYYPDKVFRSSVLHSTQDLFLPFFSNVTWFHAISGTNGTKRFDNPVLPFNDGVYFASTEKSNIIRGWIFGTTLDSKTQSLLIVNNATNVVIKVCEFQFCNDPFLGVYHKNNKSWMESEFRVYSSANNCTFEYVSQPFLMDLEGKQGNFKNLREFVFKNIDGYFKIYSKHTPINLVRDLPQGFSALEPLVDLPIGINITRFQTLLALHRSYLTPGDSSSGWTAGAAAYYVGYLQPRTFLLKYNENGTITDAVDCALDPLSETKCTLKSFTVEKGIYQTSNFRVQPTESIVRFPNITNLCPFGEVFNATRFASVYAWNRKRISNCVADYSVLYNSASFSTFKCYGVSPTKLNDLCFTNVYADSFVIRGDEVRQIAPGQTGKIADYNYKLPDDFTGCVIAWNSNNLDSKVGGNYNYLYRLFRKSNLKPFERDISTEIYQAGSTPCNGVEGFNCYFPLQSYGFQPTYGVGYQPYRVVVLSFELLHAPATVCGPKKSTNLVKNKCVNFNFNGLTGTGVLTESNKKFLPFQQFGRDIDDTTDAVRDPQTLEILDITPCSFGGVSVITPGTNTSNQVAVLYQGVNCTEVPVAIHADQLTPTWRVYSTGSNVFQTRAGCLIGAEHVNNSYECDIPIGAGICASYQTQTNSHQQAQSVASQSIIAYTMSLGAENSVAYSNNSIAIPINFTISVTTEILPVSMTKTSVDCTMYICGDSTECSNLLLQYGSFCTQLNRALTGIAVEQDKNTQEVFAQVKQIYKTPPIKDFGGFNFSQILPDPSKPSKRSFIEDLLFNKVTLADAGFIKQYGDCLGDIAARDLICAQKFNGLTVLPPLLTDEMIAQYTSALLAGTITSGWTFGAGAALQIPFAMQMAYRFNGIGVTQNVLYENQKLIANQFNSAIGKIQDSLSSTASALGKLQDVVNQNAQALNTLVKQLSSNFGAISSVLNDILARLDPPEAEVQIDRLITGRLQSLQTYVTQQLIRAAEIRASANLAATKMSECVLGQSKRVDFCGKGYHLMSFPQSAPHGVVFLHVTYVPAQEKNFTTAPAICHDGKAHFPREGVFVSNGTHWFVTQRNFYEPQIITTHNTFVSGNCDVVIGIVNNTVYDPLQPELDSFKEELDKYFKNHTSPDVDLGDISGINASVVNIQKEIDRLNEVAKNLNESLIDLQELGKYEQYIKWPWYIWLGFIAGLIAIVMVTIMLCCMTSCCSCLKGCCSCGSCCKFDEDDSEPVLKGVKLHYT

SEQ ID NO: 115 - protein, 1260 aa, synthetic construct
  REGION 1..1260: note = Recombinant SARS-CoV-2 spike protein
QCVNLTTRTQLPPAYTNSFTRGVYYPDKVFRSSVLHSTQDLFLPFFSNVTWFHAIHVSGTNGTKRFANPVLPFNDGVYFASTEKSNIIRGWIFGTTLDSKTQSLLIVNNATNVVIKVCEFQFCNDPFLGVYYHKNNKSWMESEFRVYSSANNCTFEYVSQPFLMDLEGKQGNFKNLREFVFKNIDGYFKIYSKHTPINLVRGLPQGFSALEPLVDLPIGINITRFQTLHALHRSYLTPGDSSSGWTAGAAAYYVGYLQPRTFLLKYNENGTITDAVDCALDPLSETKCTLKSFTVEKGIYQTSNFRVQPTESIVRFPNITNLCPFGEVFNATRFASVYAWNRKRISNCVADYSVLYNSASFSTFKCYGVSPTKLNDLCFTNVYADSFVIRGDEVRQIAPGQTGNIADYNYKLPDDFTGCVIAWNSNNLDSKVGGNYNYLYRLFRKSNLKPFERDISTEIYQAGSTPCNGVKGFNCYFPLQSYGFQPTYGVGYQPYRVVVLSFELLHAPATVCGPKKSTNLVKNKCVNFNFNGLTGTGVLTESNKKFLPFQQFGRDIADTTDAVRDPQTLEILDITPCSFGGVSVITPGTNTSNQVAVLYQGVNCTEVPVAIHADQLTPTWRVYSTGSNVFQTRAGCLIGAEHVNNSYECDIPIGAGICASYQTQTNSPQQAQSVASQSIIAYTMSLGVENSVAYSNNSIAIPTNFTISVTTEILPVSMTKTSVDCTMYICGDSTECSNLLLQYGSFCTQLNRALTGIAVEQDKNTQEVFAQVKQIYKTPPIKDFGGFNFSQILPDPSKPSKRSFIEDLLFNKVTLADAGFIKQYGDCLGDIAARDLICAQKFNGLTVLPPLLTDEMIAQYTSALLAGTITSGWTFGAGAALQIPFAMQMAYRFNGIGVTQNVLYENQKLIANQFNSAIGKIQDSLSSTASALGKLQDVVNQNAQALNTLVKQLSSNFGAISSVLNDILSRLDPPEAEVQIDRLITGRLQSLQTYVTQQLIRAAEIRASANLAATKMSECVLGQSKRVDFCGKGYHLMSFPQSAPHGVVFLHVTYVPAQEKNFTTAPAICHDGKAHFPREGVFVSNGTHWFVTQRNFYEPQIITTDNTFVSGNCDVVIGIVNNTVYDPLQPELDSFKEELDKYFKNHTSPDVDLGDISGINASVVNIQKEIDRLNEVAKNLNESLIDLQELGKYEQYIKWPWYIWLGFIAGLIAIVMVTIMLCCMTSCCSCLKGCCSCGSCCKFDEDDSEPVLKGVKLHYT

SEQ ID NO: 116 - protein, 196 aa, Severe acute respiratory syndrome-related coronavirus
LCPFGEVFNATRFASVYAWNRKRISNCVADYSVLYNSASFSTFKCYGVSPTKLNDLCFTNVYADSFVIRGDEVRQIAPGQTGKIADYNYKLPDDFTGCVIAWNSNNLDSKVGGNYNYLYRLFRKSNLKPFERDISTEIYQAGSTPCNGVEGFNCYFPLQSYGFQPTNGVGYQPYRVVVLSFELLHAPATVCGPKKS

SEQ ID NO: 117 - protein, 13 aa, synthetic construct
  REGION 1..13: note = signal peptide
MFVFLVLLPLVSI

SEQ ID NO: 118 - protein, 292 aa, Severe acute respiratory syndrome-related coronavirus
QCVNLTTRTQLPPAYTNSFTRGVYYPDKVFRSSVLHSTQDLFLPFFSNVTWFHAIHVSGTNGTKRFDNPVLPFNDGVYFASTEKSNIIRGWIFGTTLDSKTQSLLIVNNATNVVIKVCEFQFCNDPFLGVYYHKNNKSWMESEFRVYSSANNCTFEYVSQPFLMDLEGKQGNFKNLREFVFKNIDGYFKIYSKHTPINLVRDLPQGFSALEPLVDLPIGINITRFQTLLALHRSYLTPGDSSSGWTAGAAAYYVGYLQPRTFLLKYNENGTITDAVDCALDPLSETKCTLKS

SEQ ID NO: 119 - protein, 83 aa, Severe acute respiratory syndrome-related coronavirus
MAYRFNGIGVTQNVLYENQKLIANQFNSAIGKIQDSLSSTASALGKLQDVVNQNAQALNTLVKQLSSNFGAISSVLNDILSRL

SEQ ID NO: 120 - protein, 588 aa, Severe acute respiratory syndrome-related coronavirus
SVASQSIIAYTMSLGAENSVAYSNNSIAIPTNFTISVTTEILPVSMTKTSVDCTMYICGDSTECSNLLLQYGSFCTQLNRALTGIAVEQDKNTQEVFAQVKQIYKTPPIKDFGGFNFSQILPDPSKPSKRSFIEDLLFNKVTLADAGFIKQYGDCLGDIAARDLICAQKFNGLTVLPPLLTDEMIAQYTSALLAGTITSGWTFGAGAALQIPFAMQMAYRFNGIGVTQNVLYENQKLIANQFNSAIGKIQDSLSSTASALGKLQDVVNQNAQALNTLVKQLSSNFGAISSVLNDILSRLDKVEAEVQIDRLITGRLQSLQTYVTQQLIRAAEIRASANLAATKMSECVLGQSKRVDFCGKGYHLMSFPQSAPHGVVFLHVTYVPAQEKNFTTAPAICHDGKAHFPREGVFVSNGTHWFVTQRNFYEPQIITTDNTFVSGNCDVVIGIVNNTVYDPLQPELDSFKEELDKYFKNHTSPDVDLGDISGINASVVNIQKEIDRLNEVAKNLNESLIDLQELGKYEQYIKWPWYIWLGFIAGLIAIVMVTIMLCCMTSCCSCLKGCCSCGSCCKFDEDDSEPVLKGVKLHYT

SEQ ID NO: 121 - protein, 672 aa, Severe acute respiratory syndrome-related coronavirus
QCVNLTTRTQLPPAYTNSFTRGVYYPDKVFRSSVLHSTQDLFLPFFSNVTWFHAIHVSGTNGTKRFDNPVLPFNDGVYFASTEKSNIIRGWIFGTTLDSKTQSLLIVNNATNVVIKVCEFQFCNDPFLGVYYHKNNKSWMESEFRVYSSANNCTFEYVSQPFLMDLEGKQGNFKNLREFVFKNIDGYFKIYSKHTPINLVRDLPQGFSALEPLVDLPIGINITRFQTLLALHRSYLTPGDSSSGWTAGAAAYYVGYLQPRTFLLKYNENGTITDAVDCALDPLSETKCTLKSFTVEKGIYQTSNFRVQPTESIVRFPNITNLCPFGEVFNATRFASVYAWNRKRISNCVADYSVLYNSASFSTFKCYGVSPTKLNDLCFTNVYADSFVIRGDEVRQIAPGQTGKIADYNYKLPDDFTGCVIAWNSNNLDSKVGGNYNYLYRLFRKSNLKPFERDISTEIYQAGSTPCNGVEGFNCYFPLQSYGFQPTNGVGYQPYRVVVLSFELLHAPATVCGPKKSTNLVKNKCVNFNFNGLTGTGVLTESNKKFLPFQQFGRDIADTTDAVRDPQTLEILDITPCSFGGVSVITPGTNTSNQVAVLYQDVNCTEVPVAIHADQLTPTWRVYSTGSNVFQTRAGCLIGAEHVNNSYECDIPIGAGICASYQTQTNSPRRAR

SEQ ID NO: 122 - protein, 140 aa, Severe acute respiratory syndrome-related coronavirus
NFNGLTGTGVLTESNKKFLPFQQFGRDIADTTDAVRDPQTLEILDITPCSFGGVSVITPGTNTSNQVAVLYQDVNCTEVPVAIHADQLTPTWRVYSTGSNVFQTRAGCLIGAEHVNNSYECDIPIGAGICASYQTQTNSP

SEQ ID NO: 123 - protein, 24 aa, Severe acute respiratory syndrome-related coronavirus
WYIWLGFIAGLIAIVMVTIMLCCM

SEQ ID NO: 124 - protein, 36 aa, Severe acute respiratory syndrome-related coronavirus
TSCCSCLKGCCSCGSCCKFDEDDSEPVLKGVKLHYT

SEQ ID NO: 125 - protein, 51 aa, Severe acute respiratory syndrome-related coronavirus
DVDLGDISGINASVVNIQKEIDRLNEVAKNLNESLIDLQELGKYEQYIKWP

SEQ ID NO: 126 - protein, 197 aa, Severe acute respiratory syndrome-related coronavirus
NITNLCPFGEVFNATRFASVYAWNRKRISNCVADYSVLYNSASFSTFKCYGVSPTKLNDLCFTNVYADSFVIRGDEVRQIAPGQTGKIADYNYKLPDDFTGCVIAWNSNNLDSKVGGNYNYLYRLFRKSNLKPFERDISTEIYQAGSTPCNGVEGFNCYFPLQSYGFQPTNGVGYQPYRVVVLSFELLHAPATVCGP

SEQ ID NO: 127 - skipped

SEQ ID NO: 128 - protein, 4 aa, synthetic construct
  REGION 1..4: note = inactivated furin cleavage site
GGGG

SEQ ID NO: 129 - protein, 5 aa, synthetic construct
  REGION 1..5: note = inactivated furin cleavage site
GGGGG

SEQ ID NO: 130 - protein, 1272 aa, synthetic construct
  REGION 1..1272: note = modified coronavirus S polypeptide
MFVFLVLLPLVSSQCVNLTTRTQLPPAYTNSFTRGVYYPDKVFRSSVLHSTQDLFLPFFSNVTWFHAIHVSGTNGTKRFANPVLPFNDGVYFASTEKSNIIRGWIFGTTLDSKTQSLLIVNNATNVVIKVCEFQFCNDPFLGVYYHKNNKSWMESEFRVYSSANNCTFEYVSQPFLMDLEGKQGNFKNLREFVFKNIDGYFKIYSKHTPINLVRGLPQGFSALEPLVDLPIGINITRFQTLHALHRSYLTPGDSSSGWTAGAAAYYVGYLQPRTFLLKYNENGTITDAVDCALDPLSETKCTLKSFTVEKGIYQTSNFRVQPTESIVRFPNITNLCPFGEVFNATRFASVYAWNRKRISNCVADYSVLYNSASFSTFKCYGVSPTKLNDLCFTNVYADSFVIRGDEVRQIAPGQTGNIADYNYKLPDDFTGCVIAWNSNNLDSKVGGNYNYLYRLFRKSNLKPFERDISTEIYQAGSTPCNGVKGFNCYFPLQSYGFQPTYGVGYQPYRVVVLSFELLHAPATVCGPKKSTNLVKNKCVNFNFNGLTGTGVLTESNKKFLPFQQFGRDIADTTDAVRDPQTLEILDITPCSFGGVSVITPGTNTSNQVAVLYQGVNCTEVPVAIHADQLTPTWRVYSTGSNVFQTRAGCLIGAEHVNNSYECDIPIGAGICASYQTQTNSPQQAQSVASQSIIAYTMSLGVENSVAYSNNSIAIPTNFTISVTTEILPVSMTKTSVDCTMYICGDSTECSNLLLQYGSFCTQLNRALTGIAVEQDKNTQEVFAQVKQIYKTPPIKDFGGNFSQILPDPSKPSKRSFIEDLLFNKVTLADAGFIKQYGDCLGDIAARDLICAQKFNGLTVLPPLLTDEMIAQYTSALLAGTITSGWTFGAGAALQIPFAMQMAYRFNGIGVTQNVLYENQKLIANQFNSAIGKIQDSLSSTASALGKLQDVVNQNAQALNTLVKQLSSNFGAISSVLNDILSRLDPPEAEVQIDRLITGRLQSLQTYVTQQLIRAAEIRASANLAATKMSECVLGQSKRVDFCGKGYHLMSFPQSAPHGVVFLHVTYVPAQEKNFTTAPAICHDGKAHFPREGVFVSNGTHWFVTQRNFYEPQIITTDNTFVSGNCDVVIGIVNNTVYDPLQPELDSFKEELDKYFKNHTSPDVDLGDISGINASVVNIQKEIDRLNEVAKNLNESLIDLQELGKYEQYIKWPWYIWLGFIAGLIAIVMVTIMLCCMTSCCSCLKGCCSCGSCCKFDEDDSEPVLKGVKLHYT

SEQ ID NO: 131 - DNA, 3822 bp, synthetic construct
  misc_feature 1..3822: note = modified coronavirus S polypeptide
  source 1..3822: mol_type = other DNA
atgttcgtcttcctggtgctgctgcctctggtgtccagccagtgcgtgaacctgaccactaggactcagctgcctcccgcttacaccaactcattcactaggggtgtgtactacccagacaaggtcttccgctcctcagtgctgcactcaactcaggacctgttcctgcctttcttctccaacgtcacctggttccacgctatccacgtgtccggcaccaacggcactaagaggttcgccaaccccgtgctgccattcaacgacggagtctacttcgcttcaaccgagaagtccaacatcatcagaggatggatcttcggcaccactctggacagcaagactcagtctctgctgatcgtcaacaacgctaccaacgtggtcatcaaggtgtgcgaattccagttctgtaacgaccccttcctgggtgtctactaccacaagaacaacaagtcatggatggagtccgaattccgcgtctactccagcgctaacaactgcactttcgagtacgtgtcccagccattcctgatggacctggaaggaaagcagggtaacttcaagaacctgcgcgagttcgtgttcaagaacatcgacggctacttcaagatttacagcaagcacacccccatcaacctggtccgtggcctgccacagggattctctgctctggagcccctggtggacctgccaatcggcatcaacatcaccaggttccagactctgcacgccctgcacagatcctacctgactcccggagactcttcatccggttggaccgctggcgctgccgcttactacgtgggttacctgcagccacgcaccttcctgctgaagtacaacgaaaacggcaccatcactgacgccgtcgactgcgctctggacccactgtcagaaaccaagtgcactctgaagtccttcaccgtggagaagggaatctaccagacttcaaacttccgcgtgcagcctaccgaatccatcgtccgtttcccaaacatcactaacctgtgccctttcggagaggtcttcaacgccacccgcttcgcttccgtgtacgcctggaaccgcaagcgtatctcaaactgcgtcgctgactactccgtgctgtacaactcagcctccttcagcaccttcaagtgctacggagtgtcacccactaagctgaacgacctgtgcttcaccaacgtctacgctgactccttcgtgatccgcggtgacgaggtccgtcagatcgctccaggccagactggaaacatcgccgactacaactacaagctgcctgacgacttcaccggttgcgtcatcgcctggaacagcaacaacctggactctaaagtgggtggcaactacaactacctgtacaggctgttcagaaagtcaaacctgaagcccttcgagcgcgacatcagcactgaaatctaccaggctggttctaccccatgcaacggtgtcaagggcttcaactgctacttccctctgcagtcctacggcttccagcccacttacggtgtgggctaccagccataccgtgtggtcgtgctgagcttcgagctgctgcacgcccctgctactgtgtgcggacccaagaagtctaccaacctggtcaagaacaagtgcgtgaacttcaacttcaacggtctgaccggaactggtgtcctgaccgagagcaacaagaagttcctgcctttccagcagttcggtcgcgacatcgctgacaccactgacgccgtgcgtgaccctcagaccctggaaatcctggacatcactccctgctcattcggaggtgtctccgtgatcactcccggaaccaacacttctaaccaggtcgctgtgctgtaccagggtgtgaactgcaccgaagtcccagtggccatccacgctgaccagctgacccctacttggagggtgtactccaccggcagcaacgtcttccagactagagctggatgcctgatcggtgccgagcacgtcaacaacagctacgaatgcgacatccctatcggcgctggaatctgcgcctcttaccagacccagactaacagcccccagcaggctcagtctgtggcctctcagtcaatcatcgcctacaccatgtcactgggtgtcgaaaactccgtggcttactctaacaactcaatcgccatccctaccaacttcactatcagcgtgaccactgagatcctgcccgtcagcatgaccaagacttctgtggactgcactatgtacatctgcggcgacagcaccgaatgctctaacctgctgctgcagtacggttctttctgcacccagctgaaccgcgctctgactggcatcgccgtggagcaggacaagaacactcaggaagtcttcgctcaggtgaagcaaatctacaagaccccacctatcaaggacttcggcggattcaacttctcccagatcctgccagacccttccaagcccagcaagaggtctttcatcgaggacctgctgttcaacaaggtcactctggccgacgctggtttcatcaagcagtacggcgactgcctgggagacatcgctgctcgcgacctgatctgcgcccagaagttcaacggcctgaccgtgctgcccccactgctgactgacgaaatgatcgctcagtacactagcgccctgctggctggcaccatcacttcaggttggactttcggtgctggtgctgctctgcagatcccattcgctatgcagatggcctaccgtttcaacggaatcggtgtcacccagaacgtgctgtacgagaaccagaagctgatcgctaaccagttcaactcagccatcggcaagatccaggacagcctgagctctactgcctctgctctgggaaagctgcaggacgtcgtgaaccagaacgcccaggctctgaacaccctggtcaagcagctgtcatccaacttcggcgccatcagctctgtgctgaacgacatcctgtccaggctggaccctcccgaggctgaagtccagatcgacaggctgatcactggaagactgcagtcactgcagacctacgtgactcagcagctgatccgcgccgctgaaatccgtgcctccgctaacctggccgctaccaagatgagcgagtgcgtcctgggccagtctaagagagtggacttctgcggcaagggataccacctgatgtcattcccacagtccgcccctcacggagtcgtgttcctgcacgtcacctacgtgcccgctcaggagaagaacttcaccactgccccagctatctgccacgacggcaaggctcacttccctcgcgaaggagtcttcgtgagcaacggcacccactggttcgtcactcagcgtaacttctacgagccccagatcatcaccactgacaacactttcgtgtctggcaactgcgacgtggtcatcggtatcgtcaacaacaccgtgtacgaccctctgcagcccgagctggactcattcaaggaagagctggacaagtacttcaagaaccacacctcccctgacgtcgacctgggtgacatctcaggcatcaacgcctccgtcgtgaacatccagaaggagatcgaccgcctgaacgaagtggctaagaacctgaacgaaagcctgatcgacctgcaggagctgggcaagtacgaacagtacatcaagtggccatggtacatctggctgggattcatcgctggcctcatcgctatcgtgatggtgaccatcatgctgtgctgcatgacttcatgctgctcctgcctgaagggttgctgcagctgcggctcttgctgcaagttcgacgaggacgactctgaacctgtcctgaagggagtgaagctgcactacacctaa

SEQ ID NO: 132 - protein, 1259 aa, synthetic construct
  REGION 1..1259: note = modified coronavirus S polypeptide
QCVNLTTRTQLPPAYTNSFTRGVYYPDKVFRSSVLHSTQDLFLPFFSNVTWFHAIHVSGTNGTKRFANPVLPFNDGVYFASTEKSNIIRGWIFGTTLDSKTQSLLIVNNATNVVIKVCEFQFCNDPFLGVYYHKNNKSWMESEFRVYSSANNCTFEYVSQPFLMDLEGKQGNFKNLREFVFKNIDGYFKIYSKHTPINLVRGLPQGFSALEPLVDLPIGINITRFQTLHALHRSYLTPGDSSSGWTAGAAAYYVGYLQPRTFLLKYNENGTITDAVDCALDPLSETKCTLKSFTVEKGIYQTSNFRVQPTESIVRFPNITNLCPFGEVFNATRFASVYAWNRKRISNCVADYSVLYNSASFSTFKCYGVSPTKLNDLCFTNVYADSFVIRGDEVRQIAPGQTGNIADYNYKLPDDFTGCVIAWNSNNLDSKVGGNYNYLYRLFRKSNLKPFERDISTEIYQAGSTPCNGVKGFNCYFPLQSYGFQPTYGVGYQPYRVVVLSFELLHAPATVCGPKKSTNLVKNKCVNFNFNGLTGTGVLTESNKKFLPFQQFGRDIADTTDAVRDPQTLEILDITPCSFGGVSVITPGTNTSNQVAVLYQGVNCTEVPVAIHADQLTPTWRVYSTGSNVFQTRAGCLIGAEHVNNSYECDIPIGAGICASYQTQTNSPQQAQSVASQSIIAYTMSLGVENSVAYSNNSIAIPTNFTISVTTEILPVSMTKTSVDCTMYICGDSTECSNLLLQYGSFCTQLNRALTGIAVEQDKNTQEVFAQVKQIYKTPPIKDFGGNFSQILPDPSKPSKRSFIEDLLFNKVTLADAGFIKQYGDCLGDIAARDLICAQKFNGLTVLPPLLTDEMIAQYTSALLAGTITSGWTFGAGAALQIPFAMQMAYRFNGIGVTQNVLYENQKLIANQFNSAIGKIQDSLSSTASALGKLQDVVNQNAQALNTLVKQLSSNFGAISSVLNDILSRLDPPEAEVQIDRLITGRLQSLQTYVTQQLIRAAEIRASANLAATKMSECVLGQSKRVDFCGKGYHLMSFPQSAPHGVVFLHVTYVPAQEKNFTTAPAICHDGKAHFPREGVFVSNGTHWFVTQRNFYEPQIITTDNTFVSGNCDVVIGIVNNTVYDPLQPELDSFKEELDKYFKNHTSPDVDLGDISGINASVVNIQKEIDRLNEVAKNLNESLIDLQELGKYEQYIKWPWYIWLGFIAGLIAIVMVTIMLCCMTSCCSCLKGCCSCGSCCKFDEDDSEPVLKGVKLHYT

SEQ ID NO: 133 - protein, 1258 aa, synthetic construct
  REGION 1..1258: note = modified coronavirus S polypeptide
QCVNLTTRTQLPPAYTNSFTRGVYYPDKVFRSSVLHSTQDLFLPFFSNVTWFHAIHVSGTNGTKRFDNPVLPFNDGVYFASTEKSNIIRGWIFGTTLDSKTQSLLIVNNATNVVIKVCEFQFCNDPFLGVYYHKNNKSWMESEFRVYSSANNCTFEYVSQPFLMDLEGKQGNFKNLREFVFKNIDGYFKIYSKHTPINLVRDLPQGFSALEPLVDLPIGINITRFQTLLALHRSYLTPGDSSSGWTAGAAAYYVGYLQPRTFLLKYNENGTITDAVDCALDPLSETKCTLKSFTVEKGIYQTSNFRVQPTESIVRFPNITNLCPFGEVFNATRFASVYAWNRKRISNCVADYSVLYNSASFSTFKCYGVSPTKLNDLCFTNVYADSFVIRGDEVRQIAPGQTGKIADYNYKLPDDFTGCVIAWNSNNLDSKVGGNYNYLYRLFRKSNLKPFERDISTEIYQAGSTPCNGVEGFNCYFPLQSYGFQPTNGVGYQPYRVVVLSFELLHAPATVCGPKKSTNLVKNKCVNFNFNGLTGTGVLTESNKKFLPFQQFGRDIADTTDAVRDPQTLEILDITPCSFGGVSVITPGTNTSNQVAVLYQGVNCTEVPVAIHADQLTPTWRVYSTGSNVFQTRAGCLIGAEHVNNSYECDIPIGAGICASYQTQTNSPGGSVASQSIIAYTMSLGAENSVAYSNNSIAIPTNFTISVTTEILPVSMTKTSVDCTMYICGDSTECSNLLLQYGSFCTQLNRALTGIAVEQDKNTQEVFAQVKQIYKTPPIKDFGGFNFSQILPDPSKPSKRSFIEDLLFNKVTLADAGFIKQYGDCLGDIAARDLICAQKFNGLTVLPPLLTDEMIAQYTSALLAGTITSGWTFGAGAALQIPFAMQMAYRFNGIGVTQNVLYENQKLIANQFNSAIGKIQDSLSSTASALGKLQDVVNQNAQALNTLVKQLSSNFGAISSVLNDILSRLDPPEAEVQIDRLITGRLQSLQTYVTQQLIRAAEIRASANLAATKMSECVLGQSKRVDFCGKGYHLMSFPQSAPHGVVFLHVTYVPAQEKNFTTAPAICHDGKAHFPREGVFVSNGTHWFVTQRNFYEPQIITTDNTFVSGNCDVVIGIVNNTVYDPLQPELDSFKEELDKYFKNHTSPDVDLGDISGINASVVNIQKEIDRLNEVAKNLNESLIDLQELGKYEQYIKWPWYIWLGFIAGLIAIVMVTIMLCCMTSCCSCLKGCCSCGSCCKFDEDDSEPVLKGVKLHYT

SEQ ID NO: 134 - protein, 1271 aa, synthetic construct
  REGION 1..1271: note = modified coronavirus S polypeptide
MFVFLVLLPLVSSQCVNLTTRTQLPPAYTNSFTRGVYYPDKVFRSSVLHSTQDLFLPFFSNVTWFHAIHVSGTNGTKRFDNPVLPFNDGVYFASTEKSNIIRGWIFGTTLDSKTQSLLIVNNATNVVIKVCEFQFCNDPFLGVYYHKNNKSWMESEFRVYSSANNCTFEYVSQPFLMDLEGKQGNFKNLREFVFKNIDGYFKIYSKHTPINLVRDLPQGFSALEPLVDLPIGINITRFQTLLALHRSYLTPGDSSSGWTAGAAAYYVGYLQPRTFLLKYNENGTITDAVDCALDPLSETKCTLKSFTVEKGIYQTSNFRVQPTESIVRFPNITNLCPFGEVFNATRFASVYAWNRKRISNCVADYSVLYNSASFSTFKCYGVSPTKLNDLCFTNVYADSFVIRGDEVRQIAPGQTGKIADYNYKLPDDFTGCVIAWNSNNLDSKVGGNYNYLYRLFRKSNLKPFERDISTEIYQAGSTPCNGVEGFNCYFPLQSYGFQPTNGVGYQPYRVVVLSFELLHAPATVCGPKKSTNLVKNKCVNFNFNGLTGTGVLTESNKKFLPFQQFGRDIADTTDAVRDPQTLEILDITPCSFGGVSVITPGTNTSNQVAVLYQGVNCTEVPVAIHADQLTPTWRVYSTGSNVFQTRAGCLIGAEHVNNSYECDIPIGAGICASYQTQTNSPGGSVASQSIIAYTMSLGAENSVAYSNNSIAIPTNFTISVTTEILPVSMTKTSVDCTMYICGDSTECSNLLLQYGSFCTQLNRALTGIAVEQDKNTQEVFAQVKQIYKTPPIKDFGGFNFSQILPDPSKPSKRSFIEDLLFNKVTLADAGFIKQYGDCLGDIAARDLICAQKFNGLTVLPPLLTDEMIAQYTSALLAGTITSGWTFGAGAALQIPFAMQMAYRFNGIGVTQNVLYENQKLIANQFNSAIGKIQDSLSSTASALGKLQDVVNQNAQALNTLVKQLSSNFGAISSVLNDILSRLDPPEAEVQIDRLITGRLQSLQTYVTQQLIRAAEIRASANLAATKMSECVLGQSKRVDFCGKGYHLMSFPQSAPHGVVFLHVTYVPAQEKNFTTAPAICHDGKAHFPREGVFVSNGTHWFVTQRNFYEPQIITTDNTFVSGNCDVVIGIVNNTVYDPLQPELDSFKEELDKYFKNHTSPDVDLGDISGINASVVNIQKEIDRLNEVAKNLNESLIDLQELGKYEQYIKWPWYIWLGFIAGLIAIVMVTIMLCCMTSCCSCLKGCCSCGSCCKFDEDDSEPVLKGVKLHYT

SEQ ID NO: 135 - DNA, 3813 bp, synthetic construct
  source 1..3813: mol_type = other DNA
atgttcgtcttcctggtgctgctgcctctggtgtccagccagtgcgtgaacctgaccactaggactcagctgcctcccgcttacaccaacagcttcactaggggtgtctactaccctgacaaggtcttccgctcctcagtgctgcactctactcaggacctgttcctgcccttcttctcaaacgtgacctggttccacgccatctccggcaccaacggcactaagaggttcgacaaccccgtgctgccattcaacgacggcgtctacttcgcttcaaccgagaagtccaacatcatcagaggatggatcttcggcaccactctggacagcaagactcagtctctgctgatcgtcaacaacgccaccaacgtggtcatcaaggtgtgcgaattccagttctgcaacgacccattcctgggtgtgtaccacaagaacaacaagtcatggatggagtccgaattccgcgtctactccagcgctaacaactgcactttcgagtacgtgagccagcctttcctgatggacctggaaggaaagcagggtaacttcaagaacctgcgcgagttcgtgttcaagaacatcgacggatacttcaagatttacagcaagcacacccccatcaacctggtccgtgacctgccacagggtttctctgctctggagcccctggtggacctgccaatcggcatcaacatcaccaggttccagactctgctggctctgcaccgctcctacctgactccaggtgactcatcttctggatggactgctggagctgctgcttactacgtgggttacctgcagcctcgcaccttcctgctgaagtacaacgaaaacggcaccatcactgacgccgtcgactgcgctctggaccctctgtcagaaaccaagtgcactctgaagtccttcaccgtggagaagggtatctaccagactagcaacttccgcgtgcagcccaccgaatctatcgtccgtttcccaaacatcactaacctgtgccctttcggcgaggtcttcaacgccacccgcttcgcttccgtgtacgcctggaaccgcaagcgtatctcaaactgcgtcgctgactactccgtgctgtacaactcagcctccttcagcaccttcaagtgctacggtgtgtcacccactaagctgaacgacctgtgcttcaccaacgtctacgccgactccttcgtgatccgcggcgacgaggtccgtcagatcgctccaggccagactggaaagatcgccgactacaactacaagctgcctgacgacttcaccggctgcgtcatcgcttggaacagcaacaacctggactctaaagtgggtggcaactacaactacctgtacaggctgttcagaaagagcaacctgaagcccttcgagcgcgacatcagcactgaaatctaccaggctggctctaccccatgcaacggtgtcgagggcttcaactgctacttccctctgcagtcttacggattccagcccacttacggtgtgggctaccagccataccgtgtggtcgtgctgagcttcgaactgctgcacgcccctgctactgtgtgcggacccaagaagtctaccaacctggtcaagaacaagtgcgtgaacttcaacttcaacggtctgaccggaactggtgtcctgaccgagagcaacaagaagttcctgcccttccagcagttcggtcgcgacatcgacgacaccactgacgccgtgcgtgaccctcagaccctggaaatcctggacatcactccctgctcattcggaggtgtctccgtgatcactccaggaaccaacacttctaaccaggtcgctgtgctgtaccagggtgtcaactgcaccgaggtcccagtggccatccacgctgaccagctgacccctacttggagggtgtactccaccggcagcaacgtgttccagactagagctggttgcctgatcggcgccgagcacgtgaacaacagctacgaatgcgacatcccaatcggcgctggaatctgcgcctcttaccagacccagactaacagccaccagcaggctcagtctgtcgcctctcagtcaatcatcgcttacactatgtcactgggcgctgaaaactccgtggcctactctaacaactcaatcgccatccctatcaacttcaccatctcagtgaccactgagatcctgcccgtcagcatgaccaagacttctgtggactgcactatgtacatctgcggagacagcaccgaatgctctaacctgctgctgcagtacggctccttctgcacccagctgaaccgcgctctgactggaatcgccgtggagcaggacaagaacactcaggaagtcttcgctcaggtgaagcaaatctacaagaccccacctatcaaggacttcggcggattcaacttctcccagatcctgccagacccttccaagccaagcaagaggtctttcatcgaggacctgctgttcaacaaggtcaccctggccgacgctggcttcatcaagcagtacggagactgcctgggtgacatcgccgctcgcgacctgatctgcgctcagaagttcaacggactgaccgtgctgcccccactgctgactgacgaaatgatcgcccagtacacttcagccctgctggctggaaccatcacttctggttggaccttcggtgctggtgctgctctgcagatccctttcgctatgcagatggcctaccgtttcaacggaatcggtgtcacccagaacgtgctgtacgagaaccagaagctgatcgctaaccagttcaactccgccatcggcaagatccaggacagcctgagctctactgcctctgctctgggaaagctgcaggacgtcgtgaaccagaacgcccaggctctgaacaccctggtcaagcagctgtcatccaacttcggagccatcagctctgtgctgaacgacatcctcgctaggctggaccctcccgaggctgaagtccagatcgacaggctgatcactggtagactgcagtcactgcagacctacgtgactcagcagctgatccgcgccgctgaaatccgtgcctccgctaacctggccgctaccaagatgagcgagtgcgtcctgggacagtctaagagagtggacttctgcggcaagggataccacctgatgtcattcccacagtccgctcctcacggtgtcgtgttcctgcacgtcacctacgtgcccgcccaggagaagaacttcaccactgccccagctatctgccacgacggcaaggctcacttcccccgcgaaggtgtcttcgtgtcaaacggcacccactggttcgtcactcagcgtaacttctacgagccacagatcatcaccactcacaacactttcgtgtccggaaactgcgacgtggtcatcggtatcgtcaacaacaccgtgtacgaccctctgcagcccgagctggactcattcaaggaagagctggacaagtacttcaagaaccacacctcccctgacgtcgacctgggcgacatctcaggaatcaacgcttccgtcgtgaacatccagaaggagatcgaccgcctgaacgaagtggccaagaacctgaacgaatcactgatcgacctgcaggagctgggcaagtacgaacagtacatcaagtggccttggtacatctggctgggtttcatcgctggcctcatcgctatcgtgatggtgaccatcatgctgtgctgcatgacttcatgctgctcctgcctgaagggctgctgcagctgcggatcttgctgcaagttcgacgaggacgactccgaacccgtcctgaagggagtgaagctgcactacacctaa

SEQ ID NO: 136 - protein, 1270 aa, synthetic construct
  REGION 1..1270: note = modified coronavirus S polypeptide
MFVFLVLLPLVSSQCVNLTTRTQLPPAYTNSFTRGVYYPDKVFRSSVLHSTQDLFLPFFSNVTWFHAISGTNGTKRFDNPVLPFNDGVYFASTEKSNIIRGWIFGTTLDSKTQSLLIVNNATNVVIKVCEFQFCNDPFLGVYHKNNKSWMESEFRVYSSANNCTFEYVSQPFLMDLEGKQGNFKNLREFVFKNIDGYFKIYSKHTPINLVRDLPQGFSALEPLVDLPIGINITRFQTLLALHRSYLTPGDSSSGWTAGAAAYYVGYLQPRTFLLKYNENGTITDAVDCALDPLSETKCTLKSFTVEKGIYQTSNFRVQPTESIVRFPNITNLCPFGEVFNATRFASVYAWNRKRISNCVADYSVLYNSASFSTFKCYGVSPTKLNDLCFTNVYADSFVIRGDEVRQIAPGQTGKIADYNYKLPDDFTGCVIAWNSNNLDSKVGGNYNYLYRLFRKSNLKPFERDISTEIYQAGSTPCNGVEGFNCYFPLQSYGFQPTYGVGYQPYRVVVLSFELLHAPATVCGPKKSTNLVKNKCVNFNFNGLTGTGVLTESNKKFLPFQQFGRDIDDTTDAVRDPQTLEILDITPCSFGGVSVITPGTNTSNQVAVLYQGVNCTEVPVAIHADQLTPTWRVYSTGSNVFQTRAGCLIGAEHVNNSYECDIPIGAGICASYQTQTNSHQQAQSVASQSIIAYTMSLGAENSVAYSNNSIAIPINFTISVTTEILPVSMTKTSVDCTMYICGDSTECSNLLLQYGSFCTQLNRALTGIAVEQDKNTQEVFAQVKQIYKTPPIKDFGGFNFSQILPDPSKPSKRSFIEDLLFNKVTLADAGFIKQYGDCLGDIAARDLICAQKFNGLTVLPPLLTDEMIAQYTSALLAGTITSGWTFGAGAALQIPFAMQMAYRFNGIGVTQNVLYENQKLIANQFNSAIGKIQDSLSSTASALGKLQDVVNQNAQALNTLVKQLSSNFGAISSVLNDILARLDPPEAEVQIDRLITGRLQSLQTYVTQQLIRAAEIRASANLAATKMSECVLGQSKRVDFCGKGYHLMSFPQSAPHGVVFLHVTYVPAQEKNFTTAPAICHDGKAHFPREGVFVSNGTHWFVTQRNFYEPQIITTHNTFVSGNCDVVIGIVNNTVYDPLQPELDSFKEELDKYFKNHTSPDVDLGDISGINASVVNIQKEIDRLNEVAKNLNESLIDLQELGKYEQYIKWPWYIWLGFIAGLIAIVMVTIMLCCMTSCCSCLKGCCSCGSCCKFDEDDSEPVLKGVKLHYT

SEQ ID NO: 137 - protein, 1268 aa, synthetic construct
  REGION 1..1268: note = modified coronavirus S polypeptide
MFVFLVLLPLVSSQCVNLTTRTQLPPAYTNSFTRGVYYPDKVFRSSVLHSTQDLFLPFFSNVTWFHAISGTNGTKRFDNPVLPFNDGVYFASTEKSNIIRGWIFGTTLDSKTQSLLIVNNATNVVIKVCEFQFCNDPFLGVYHKNNKSWMESEFRVYSSANNCTFEYVSQPFLMDLEGKQGNFKNLREFVFKNIDGYFKIYSKHTPINLVRDLPQGFSALEPLVDLPIGINITRFQTLLALHRSYLTPGDSSSGWTAGAAAYYVGYLQPRTFLLKYNENGTITDAVDCALDPLSETKCTLKSFTVEKGIYQTSNFRVQPTESIVRFPNITNLCPFGEVFNATRFASVYAWNRKRISNCVADYSVLYNSASFSTFKCYGVSPTKLNDLCFTNVYADSFVIRGDEVRQIAPGQTGKIADYNYKLPDDFTGCVIAWNSNNLDSKVGGNYNYLYRLFRKSNLKPFERDISTEIYQAGSTPCNGVEGFNCYFPLQSYGFQPTYGVGYQPYRVVVLSFELLHAPATVCGPKKSTNLVKNKCVNFNFNGLTGTGVLTESNKKFLPFQQFGRDIDDTTDAVRDPQTLEILDITPCSFGGVSVITPGTNTSNQVAVLYQGVNCTEVPVAIHADQLTPTWRVYSTGSNVFQTRAGCLIGAEHVNNSYECDIPIGAGICASYQTQTNSHGGSVASQSIIAYTMSLGAENSVAYSNNSIAIPINFTISVTTEILPVSMTKTSVDCTMYICGDSTECSNLLLQYGSFCTQLNRALTGIAVEQDKNTQEVFAQVKQIYKTPPIKDFGGFNFSQILPDPSKPSKRSFIEDLLFNKVTLADAGFIKQYGDCLGDIAARDLICAQKFNGLTVLPPLLTDEMIAQYTSALLAGTITSGWTFGAGAALQIPFAMQMAYRFNGIGVTQNVLYENQKLIANQFNSAIGKIQDSLSSTASALGKLQDVVNQNAQALNTLVKQLSSNFGAISSVLNDILARLDPPEAEVQIDRLITGRLQSLQTYVTQQLIRAAEIRASANLAATKMSECVLGQSKRVDFCGKGYHLMSFPQSAPHGVVFLHVTYVPAQEKNFTTAPAICHDGKAHFPREGVFVSNGTHWFVTQRNFYEPQIITTHNTFVSGNCDVVIGIVNNTVYDPLQPELDSFKEELDKYFKNHTSPDVDLGDISGINASVVNIQKEIDRLNEVAKNLNESLIDLQELGKYEQYIKWPWYIWLGFIAGLIAIVMVTIMLCCMTSCCSCLKGCCSCGSCCKFDEDDSEPVLKGVKLHYT

SEQ ID NO: 138 - protein, 1255 aa, synthetic construct
  REGION 1..1255: note = modified coronavirus S polypeptide
QCVNLTTRTQLPPAYTNSFTRGVYYPDKVFRSSVLHSTQDLFLPFFSNVTWFHAISGTNGTKRFDNPVLPFNDGVYFASTEKSNIIRGWIFGTTLDSKTQSLLIVNNATNVVIKVCEFQFCNDPFLGVYHKNNKSWMESEFRVYSSANNCTFEYVSQPFLMDLEGKQGNFKNLREFVFKNIDGYFKIYSKHTPINLVRDLPQGFSALEPLVDLPIGINITRFQTLLALHRSYLTPGDSSSGWTAGAAAYYVGYLQPRTFLLKYNENGTITDAVDCALDPLSETKCTLKSFTVEKGIYQTSNFRVQPTESIVRFPNITNLCPFGEVFNATRFASVYAWNRKRISNCVADYSVLYNSASFSTFKCYGVSPTKLNDLCFTNVYADSFVIRGDEVRQIAPGQTGKIADYNYKLPDDFTGCVIAWNSNNLDSKVGGNYNYLYRLFRKSNLKPFERDISTEIYQAGSTPCNGVEGFNCYFPLQSYGFQPTYGVGYQPYRVVVLSFELLHAPATVCGPKKSTNLVKNKCVNFNFNGLTGTGVLTESNKKFLPFQQFGRDIDDTTDAVRDPQTLEILDITPCSFGGVSVITPGTNTSNQVAVLYQGVNCTEVPVAIHADQLTPTWRVYSTGSNVFQTRAGCLIGAEHVNNSYECDIPIGAGICASYQTQTNSHGGSVASQSIIAYTMSLGAENSVAYSNNSIAIPINFTISVTTEILPVSMTKTSVDCTMYICGDSTECSNLLLQYGSFCTQLNRALTGIAVEQDKNTQEVFAQVKQIYKTPPIKDFGGFNFSQILPDPSKPSKRSFIEDLLFNKVTLADAGFIKQYGDCLGDIAARDLICAQKFNGLTVLPPLLTDEMIAQYTSALLAGTITSGWTFGAGAALQIPFAMQMAYRFNGIGVTQNVLYENQKLIANQFNSAIGKIQDSLSSTASALGKLQDVVNQNAQALNTLVKQLSSNFGAISSVLNDILARLDPPEAEVQIDRLITGRLQSLQTYVTQQLIRAAEIRASANLAATKMSECVLGQSKRVDFCGKGYHLMSFPQSAPHGVVFLHVTYVPAQEKNFTTAPAICHDGKAHFPREGVFVSNGTHWFVTQRNFYEPQIITTHNTFVSGNCDVVIGIVNNTVYDPLQPELDSFKEELDKYFKNHTSPDVDLGDISGINASVVNIQKEIDRLNEVAKNLNESLIDLQELGKYEQYIKWPWYIWLGFIAGLIAIVMVTIMLCCMTSCCSCLKGCCSCGSCCKFDEDDSEPVLKGVKLHYT

SEQ ID NO: 139 - DNA, 3807 bp, synthetic construct
  misc_feature 1..3807: note = modified coronavirus S polypeptide
  source 1..3807: mol_type = other DNA
atgttcgtcttcctggtgctgctgcctctggtgtccagccagtgcgtgaacctgaccactaggactcagctgcctcccgcttacaccaacagcttcactaggggtgtctactaccctgacaaggtcttccgctcctcagtgctgcactctactcaggacctgttcctgcccttcttctcaaacgtgacctggttccacgccatctccggcaccaacggcactaagaggttcgacaaccccgtgctgccattcaacgacggcgtctacttcgcttcaaccgagaagtccaacatcatcagaggatggatcttcggcaccactctggacagcaagactcagtctctgctgatcgtcaacaacgccaccaacgtggtcatcaaggtgtgcgaattccagttctgcaacgacccattcctgggtgtgtaccacaagaacaacaagtcatggatggagtccgaattccgcgtctactccagcgctaacaactgcactttcgagtacgtgagccagcctttcctgatggacctggaaggaaagcagggtaacttcaagaacctgcgcgagttcgtgttcaagaacatcgacggatacttcaagatttacagcaagcacacccccatcaacctggtccgtgacctgccacagggtttctctgctctggagcccctggtggacctgccaatcggcatcaacatcaccaggttccagactctgctggctctgcaccgctcctacctgactccaggtgactcatcttctggatggactgctggagctgctgcttactacgtgggttacctgcagcctcgcaccttcctgctgaagtacaacgaaaacggcaccatcactgacgccgtcgactgcgctctggaccctctgtcagaaaccaagtgcactctgaagtccttcaccgtggagaagggtatctaccagactagcaacttccgcgtgcagcccaccgaatctatcgtccgtttcccaaacatcactaacctgtgccctttcggcgaggtcttcaacgccacccgcttcgcttccgtgtacgcctggaaccgcaagcgtatctcaaactgcgtcgctgactactccgtgctgtacaactcagcctccttcagcaccttcaagtgctacggtgtgtcacccactaagctgaacgacctgtgcttcaccaacgtctacgccgactccttcgtgatccgcggcgacgaggtccgtcagatcgctccaggccagactggaaagatcgccgactacaactacaagctgcctgacgacttcaccggctgcgtcatcgcttggaacagcaacaacctggactctaaagtgggtggcaactacaactacctgtacaggctgttcagaaagagcaacctgaagcccttcgagcgcgacatcagcactgaaatctaccaggctggctctaccccatgcaacggtgtcgagggcttcaactgctacttccctctgcagtcttacggattccagcccacttacggtgtgggctaccagccataccgtgtggtcgtgctgagcttcgaactgctgcacgcccctgctactgtgtgcggacccaagaagtctaccaacctggtcaagaacaagtgcgtgaacttcaacttcaacggtctgaccggaactggtgtcctgaccgagagcaacaagaagttcctgcccttccagcagttcggtcgcgacatcgacgacaccactgacgccgtgcgtgaccctcagaccctggaaatcctggacatcactccctgctcattcggaggtgtctccgtgatcactccaggaaccaacacttctaaccaggtcgctgtgctgtaccagggtgtcaactgcaccgaggtcccagtggccatccacgctgaccagctgacccctacttggagggtgtactccaccggcagcaacgtgttccagactagagctggttgcctgatcggcgccgagcacgtgaacaacagctacgaatgcgacatcccaatcggcgctggaatctgcgcctcttaccagacccagactaacagccacggtggttctgtcgcctctcagtcaatcatcgcttacactatgtcactgggcgctgaaaactccgtggcctactctaacaactcaatcgccatccctatcaacttcaccatctcagtgaccactgagatcctgcccgtcagcatgaccaagacttctgtggactgcactatgtacatctgcggagacagcaccgaatgctctaacctgctgctgcagtacggctccttctgcacccagctgaaccgcgctctgactggaatcgccgtggagcaggacaagaacactcaggaagtcttcgctcaggtgaagcaaatctacaagaccccacctatcaaggacttcggcggattcaacttctcccagatcctgccagacccttccaagccaagcaagaggtctttcatcgaggacctgctgttcaacaaggtcaccctggccgacgctggcttcatcaagcagtacggagactgcctgggtgacatcgccgctcgcgacctgatctgcgctcagaagttcaacggactgaccgtgctgcccccactgctgactgacgaaatgatcgcccagtacacttcagccctgctggctggaaccatcacttctggttggaccttcggtgctggtgctgctctgcagatccctttcgctatgcagatggcctaccgtttcaacggaatcggtgtcacccagaacgtgctgtacgagaaccagaagctgatcgctaaccagttcaactccgccatcggcaagatccaggacagcctgagctctactgcctctgctctgggaaagctgcaggacgtcgtgaaccagaacgcccaggctctgaacaccctggtcaagcagctgtcatccaacttcggagccatcagctctgtgctgaacgacatcctcgctaggctggaccctcccgaggctgaagtccagatcgacaggctgatcactggtagactgcagtcactgcagacctacgtgactcagcagctgatccgcgccgctgaaatccgtgcctccgctaacctggccgctaccaagatgagcgagtgcgtcctgggacagtctaagagagtggacttctgcggcaagggataccacctgatgtcattcccacagtccgctcctcacggtgtcgtgttcctgcacgtcacctacgtgcccgcccaggagaagaacttcaccactgccccagctatctgccacgacggcaaggctcacttcccccgcgaaggtgtcttcgtgtcaaacggcacccactggttcgtcactcagcgtaacttctacgagccacagatcatcaccactcacaacactttcgtgtccggaaactgcgacgtggtcatcggtatcgtcaacaacaccgtgtacgaccctctgcagcccgagctggactcattcaaggaagagctggacaagtacttcaagaaccacacctcccctgacgtcgacctgggcgacatctcaggaatcaacgcttccgtcgtgaacatccagaaggagatcgaccgcctgaacgaagtggccaagaacctgaacgaatcactgatcgacctgcaggagctgggcaagtacgaacagtacatcaagtggccttggtacatctggctgggtttcatcgctggcctcatcgctatcgtgatggtgaccatcatgctgtgctgcatgacttcatgctgctcctgcctgaagggctgctgcagctgcggatcttgctgcaagttcgacgaggacgactccgaacccgtcctgaagggagtgaagctgcactacacctaa

SEQ ID NO: 140 - protein, 1270 aa, synthetic construct
  REGION 1..1270: note = modified coronavirus S polypeptide
MFVFLVLLPLVSSQCVNLTTRTQLPPAYTNSFTRGVYYPDKVFRSSVLHSTQDLFLPFFSNVTWFHAIHVSGTNGTKRFANPVLPFNDGVYFASTEKSNIIRGWIFGTTLDSKTQSLLIVNNATNVVIKVCEFQFCNDPFLGVYYHKNNKSWMESEFRVYSSANNCTFEYVSQPFLMDLEGKQGNFKNLREFVFKNIDGYFKIYSKHTPINLVRGLPQGFSALEPLVDLPIGINITRFQTLHALHRSYLTPGDSSSGWTAGAAAYYVGYLQPRTFLLKYNENGTITDAVDCALDPLSETKCTLKSFTVEKGIYQTSNFRVQPTESIVRFPNITNLCPFGEVFNATRFASVYAWNRKRISNCVADYSVLYNSASFSTFKCYGVSPTKLNDLCFTNVYADSFVIRGDEVRQIAPGQTGNIADYNYKLPDDFTGCVIAWNSNNLDSKVGGNYNYLYRLFRKSNLKPFERDISTEIYQAGSTPCNGVKGFNCYFPLQSYGFQPTYGVGYQPYRVVVLSFELLHAPATVCGPKKSTNLVKNKCVNFNFNGLTGTGVLTESNKKFLPFQQFGRDIADTTDAVRDPQTLEILDITPCSFGGVSVITPGTNTSNQVAVLYQGVNCTEVPVAIHADQLTPTWRVYSTGSNVFQTRAGCLIGAEHVNNSYECDIPIGAGICASYQTQTNSPGGSVASQSIIAYTMSLGVENSVAYSNNSIAIPTNFTISVTTEILPVSMTKTSVDCTMYICGDSTECSNLLLQYGSFCTQLNRALTGIAVEQDKNTQEVFAQVKQIYKTPPIKDFGGNFSQILPDPSKPSKRSFIEDLLFNKVTLADAGFIKQYGDCLGDIAARDLICAQKFNGLTVLPPLLTDEMIAQYTSALLAGTITSGWTFGAGAALQIPFAMQMAYRFNGIGVTQNVLYENQKLIANQFNSAIGKIQDSLSSTASALGKLQDVVNQNAQALNTLVKQLSSNFGAISSVLNDILSRLDPPEAEVQIDRLITGRLQSLQTYVTQQLIRAAEIRASANLAATKMSECVLGQSKRVDFCGKGYHLMSFPQSAPHGVVFLHVTYVPAQEKNFTTAPAICHDGKAHFPREGVFVSNGTHWFVTQRNFYEPQIITTDNTFVSGNCDVVIGIVNNTVYDPLQPELDSFKEELDKYFKNHTSPDVDLGDISGINASVVNIQKEIDRLNEVAKNLNESLIDLQELGKYEQYIKWPWYIWLGFIAGLIAIVMVTIMLCCMTSCCSCLKGCCSCGSCCKFDEDDSEPVLKGVKLHYT

SEQ ID NO: 141 - protein, 1257 aa, synthetic construct
  REGION 1..1257: note = modified coronavirus S polypeptide
QCVNLTTRTQLPPAYTNSFTRGVYYPDKVFRSSVLHSTQDLFLPFFSNVTWFHAIHVSGTNGTKRFANPVLPFNDGVYFASTEKSNIIRGWIFGTTLDSKTQSLLIVNNATNVVIKVCEFQFCNDPFLGVYYHKNNKSWMESEFRVYSSANNCTFEYVSQPFLMDLEGKQGNFKNLREFVFKNIDGYFKIYSKHTPINLVRGLPQGFSALEPLVDLPIGINITRFQTLHALHRSYLTPGDSSSGWTAGAAAYYVGYLQPRTFLLKYNENGTITDAVDCALDPLSETKCTLKSFTVEKGIYQTSNFRVQPTESIVRFPNITNLCPFGEVFNATRFASVYAWNRKRISNCVADYSVLYNSASFSTFKCYGVSPTKLNDLCFTNVYADSFVIRGDEVRQIAPGQTGNIADYNYKLPDDFTGCVIAWNSNNLDSKVGGNYNYLYRLFRKSNLKPFERDISTEIYQAGSTPCNGVKGFNCYFPLQSYGFQPTYGVGYQPYRVVVLSFELLHAPATVCGPKKSTNLVKNKCVNFNFNGLTGTGVLTESNKKFLPFQQFGRDIADTTDAVRDPQTLEILDITPCSFGGVSVITPGTNTSNQVAVLYQGVNCTEVPVAIHADQLTPTWRVYSTGSNVFQTRAGCLIGAEHVNNSYECDIPIGAGICASYQTQTNSPGGSVASQSIIAYTMSLGVENSVAYSNNSIAIPTNFTISVTTEILPVSMTKTSVDCTMYICGDSTECSNLLLQYGSFCTQLNRALTGIAVEQDKNTQEVFAQVKQIYKTPPIKDFGGNFSQILPDPSKPSKRSFIEDLLFNKVTLADAGFIKQYGDCLGDIAARDLICAQKFNGLTVLPPLLTDEMIAQYTSALLAGTITSGWTFGAGAALQIPFAMQMAYRFNGIGVTQNVLYENQKLIANQFNSAIGKIQDSLSSTASALGKLQDVVNQNAQALNTLVKQLSSNFGAISSVLNDILSRLDPPEAEVQIDRLITGRLQSLQTYVTQQLIRAAEIRASANLAATKMSECVLGQSKRVDFCGKGYHLMSFPQSAPHGVVFLHVTYVPAQEKNFTTAPAICHDGKAHFPREGVFVSNGTHWFVTQRNFYEPQIITTDNTFVSGNCDVVIGIVNNTVYDPLQPELDSFKEELDKYFKNHTSPDVDLGDISGINASVVNIQKEIDRLNEVAKNLNESLIDLQELGKYEQYIKWPWYIWLGFIAGLIAIVMVTIMLCCMTSCCSCLKGCCSCGSCCKFDEDDSEPVLKGVKLHYT

SEQ ID NO: 142 - DNA, 3816 bp, synthetic construct
  misc_feature 1..3816: note = modified coronavirus S polypeptide
  source 1..3816: mol_type = other DNA
atgttcgtcttcctggtgctgctgcctctggtgtccagccagtgcgtgaacctgaccactaggactcagctgcctcccgcttacaccaactcattcactaggggtgtgtactacccagacaaggtcttccgctcctcagtgctgcactcaactcaggacctgttcctgcctttcttctccaacgtcacctggttccacgctatccacgtgtccggcaccaacggcactaagaggttcgccaaccccgtgctgccattcaacgacggagtctacttcgcttcaaccgagaagtccaacatcatcagaggatggatcttcggcaccactctggacagcaagactcagtctctgctgatcgtcaacaacgctaccaacgtggtcatcaaggtgtgcgaattccagttctgtaacgaccccttcctgggtgtctactaccacaagaacaacaagtcatggatggagtccgaattccgcgtctactccagcgctaacaactgcactttcgagtacgtgtcccagccattcctgatggacctggaaggaaagcagggtaacttcaagaacctgcgcgagttcgtgttcaagaacatcgacggctacttcaagatttacagcaagcacacccccatcaacctggtccgtggcctgccacagggattctctgctctggagcccctggtggacctgccaatcggcatcaacatcaccaggttccagactctgcacgccctgcacagatcctacctgactcccggagactcttcatccggttggaccgctggcgctgccgcttactacgtgggttacctgcagccacgcaccttcctgctgaagtacaacgaaaacggcaccatcactgacgccgtcgactgcgctctggacccactgtcagaaaccaagtgcactctgaagtccttcaccgtggagaagggaatctaccagacttcaaacttccgcgtgcagcctaccgaatccatcgtccgtttcccaaacatcactaacctgtgccctttcggagaggtcttcaacgccacccgcttcgcttccgtgtacgcctggaaccgcaagcgtatctcaaactgcgtcgctgactactccgtgctgtacaactcagcctccttcagcaccttcaagtgctacggagtgtcacccactaagctgaacgacctgtgcttcaccaacgtctacgctgactccttcgtgatccgcggtgacgaggtccgtcagatcgctccaggccagactggaaacatcgccgactacaactacaagctgcctgacgacttcaccggttgcgtcatcgcctggaacagcaacaacctggactctaaagtgggtggcaactacaactacctgtacaggctgttcagaaagtcaaacctgaagcccttcgagcgcgacatcagcactgaaatctaccaggctggttctaccccatgcaacggtgtcaagggcttcaactgctacttccctctgcagtcctacggcttccagcccacttacggtgtgggctaccagccataccgtgtggtcgtgctgagcttcgagctgctgcacgcccctgctactgtgtgcggacccaagaagtctaccaacctggtcaagaacaagtgcgtgaacttcaacttcaacggtctgaccggaactggtgtcctgaccgagagcaacaagaagttcctgcctttccagcagttcggtcgcgacatcgctgacaccactgacgccgtgcgtgaccctcagaccctggaaatcctggacatcactccctgctcattcggaggtgtctccgtgatcactcccggaaccaacacttctaaccaggtcgctgtgctgtaccagggtgtgaactgcaccgaagtcccagtggccatccacgctgaccagctgacccctacttggagggtgtactccaccggcagcaacgtcttccagactagagctggatgcctgatcggtgccgagcacgtcaacaacagctacgaatgcgacatccctatcggcgctggaatctgcgcctcttaccagacccagactaacagcccaggtggttctgtggcctctcagtcaatcatcgcctacaccatgtcactgggtgtcgaaaactccgtggcttactctaacaactcaatcgccatccctaccaacttcactatcagcgtgaccactgagatcctgcccgtcagcatgaccaagacttctgtggactgcactatgtacatctgcggcgacagcaccgaatgctctaacctgctgctgcagtacggttctttctgcacccagctgaaccgcgctctgactggcatcgccgtggagcaggacaagaacactcaggaagtcttcgctcaggtgaagcaaatctacaagaccccacctatcaaggacttcggcggattcaacttctcccagatcctgccagacccttccaagcccagcaagaggtctttcatcgaggacctgctgttcaacaaggtcactctggccgacgctggtttcatcaagcagtacggcgactgcctgggagacatcgctgctcgcgacctgatctgcgcccagaagttcaacggcctgaccgtgctgcccccactgctgactgacgaaatgatcgctcagtacactagcgccctgctggctggcaccatcacttcaggttggactttcggtgctggtgctgctctgcagatcccattcgctatgcagatggcctaccgtttcaacggaatcggtgtcacccagaacgtgctgtacgagaaccagaagctgatcgctaaccagttcaactcagccatcggcaagatccaggacagcctgagctctactgcctctgctctgggaaagctgcaggacgtcgtgaaccagaacgcccaggctctgaacaccctggtcaagcagctgtcatccaacttcggcgccatcagctctgtgctgaacgacatcctgtccaggctggaccctcccgaggctgaagtccagatcgacaggctgatcactggaagactgcagtcactgcagacctacgtgactcagcagctgatccgcgccgctgaaatccgtgcctccgctaacctggccgctaccaagatgagcgagtgcgtcctgggccagtctaagagagtggacttctgcggcaagggataccacctgatgtcattcccacagtccgcccctcacggagtcgtgttcctgcacgtcacctacgtgcccgctcaggagaagaacttcaccactgccccagctatctgccacgacggcaaggctcacttccctcgcgaaggagtcttcgtgagcaacggcacccactggttcgtcactcagcgtaacttctacgagccccagatcatcaccactgacaacactttcgtgtctggcaactgcgacgtggtcatcggtatcgtcaacaacaccgtgtacgaccctctgcagcccgagctggactcattcaaggaagagctggacaagtacttcaagaaccacacctcccctgacgtcgacctgggtgacatctcaggcatcaacgcctccgtcgtgaacatccagaaggagatcgaccgcctgaacgaagtggctaagaacctgaacgaaagcctgatcgacctgcaggagctgggcaagtacgaacagtacatcaagtggccatggtacatctggctgggattcatcgctggcctcatcgctatcgtgatggtgaccatcatgctgtgctgcatgacttcatgctgctcctgcctgaagggttgctgcagctgcggctcttgctgcaagttcgacgaggacgactctgaacctgtcctgaagggagtgaagctgcactacacctaa

SEQ ID NO: 143 - protein, 1269 aa, synthetic construct
  REGION 1..1269: note = modified coronavirus S polypeptide
MFVFLVLLPLVSSQCVNFTTRTQLPPAYTNSFTRGVYYPDKVFRSSVLHSTQDLFLPFFSNVTWFHAIHVSGTNGTKRFANPVLPFNDGVYFASTEKSNIIRGWIFGTTLDSKTQSLLIVNNATNVVIKVCEFQFCNDPFLGVYYHKNNKSWMESEFRVYSSANNCTFEYVSQPFLMDLEGKQGNFKNLREFVFKNIDGYFKIYSKHTPINLVRGLPQGFSALEPLVDLPIGINITRFQTLHRSYLTPGDSSSGWTAGAAAYYVGYLQPRTFLLKYNENGTITDAVDCALDPLSETKCTLKSFTVEKGIYQTSNFRVQPTESIVRFPNITNLCPFGEVFNATRFASVYAWNRKRISNCVADYSVLYNSASFSTFKCYGVSPTKLNDLCFTNVYADSFVIRGDEVRQIAPGQTGNIADYNYKLPDDFTGCVIAWNSNNLDSKVGGNYNYLYRLFRKSNLKPFERDISTEIYQAGSTPCNGVKGFNCYFPLQSYGFQPTYGVGYQPYRVVVLSFELLHAPATVCGPKKSTNLVKNKCVNFNFNGLTGTGVLTESNKKFLPFQQFGRDIADTTDAVRDPQTLEILDITPCSFGGVSVITPGTNTSNQVAVLYQGVNCTEVPVAIHADQLTPTWRVYSTGSNVFQTRAGCLIGAEHVNNSYECDIPIGAGICASYQTQTNSPQQAQSVASQSIIAYTMSLGVENSVAYSNNSIAIPTNFTISVTTEILPVSMTKTSVDCTMYICGDSTECSNLLLQYGSFCTQLNRALTGIAVEQDKNTQEVFAQVKQIYKTPPIKDFGGNFSQILPDPSKPSKRSFIEDLLFNKVTLADAGFIKQYGDCLGDIAARDLICAQKFNGLTVLPPLLTDEMIAQYTSALLAGTITSGWTFGAGAALQIPFAMQMAYRFNGIGVTQNVLYENQKLIANQFNSAIGKIQDSLSSTASALGKLQDVVNQNAQALNTLVKQLSSNFGAISSVLNDILSRLDPPEAEVQIDRLITGRLQSLQTYVTQQLIRAAEIRASANLAATKMSECVLGQSKRVDFCGKGYHLMSFPQSAPHGVVFLHVTYVPAQEKNFTTAPAICHDGKAHFPREGVFVSNGTHWFVTQRNFYEPQIITTDNTFVSGNCDVVIGIVNNTVYDPLQPELDSFKEELDKYFKNHTSPDVDLGDISGINASVVNIQKEIDRLNEVAKNLNESLIDLQELGKYEQYIKWPWYIWLGFIAGLIAIVMVTIMLCCMTSCCSCLKGCCSCGSCCKFDEDDSEPVLKGVKLHYT

SEQ ID NO: 144 - protein, 1256 aa, synthetic construct
  REGION 1..1256: note = modified coronavirus S polypeptide
QCVNFTTRTQLPPAYTNSFTRGVYYPDKVFRSSVLHSTQDLFLPFFSNVTWFHAIHVSGTNGTKRFANPVLPFNDGVYFASTEKSNIIRGWIFGTTLDSKTQSLLIVNNATNVVIKVCEFQFCNDPFLGVYYHKNNKSWMESEFRVYSSANNCTFEYVSQPFLMDLEGKQGNFKNLREFVFKNIDGYFKIYSKHTPINLVRGLPQGFSALEPLVDLPIGINITRFQTLHRSYLTPGDSSSGWTAGAAAYYVGYLQPRTFLLKYNENGTITDAVDCALDPLSETKCTLKSFTVEKGIYQTSNFRVQPTESIVRFPNITNLCPFGEVFNATRFASVYAWNRKRISNCVADYSVLYNSASFSTFKCYGVSPTKLNDLCFTNVYADSFVIRGDEVRQIAPGQTGNIADYNYKLPDDFTGCVIAWNSNNLDSKVGGNYNYLYRLFRKSNLKPFERDISTEIYQAGSTPCNGVKGFNCYFPLQSYGFQPTYGVGYQPYRVVVLSFELLHAPATVCGPKKSTNLVKNKCVNFNFNGLTGTGVLTESNKKFLPFQQFGRDIADTTDAVRDPQTLEILDITPCSFGGVSVITPGTNTSNQVAVLYQGVNCTEVPVAIHADQLTPTWRVYSTGSNVFQTRAGCLIGAEHVNNSYECDIPIGAGICASYQTQTNSPQQAQSVASQSIIAYTMSLGVENSVAYSNNSIAIPTNFTISVTTEILPVSMTKTSVDCTMYICGDSTECSNLLLQYGSFCTQLNRALTGIAVEQDKNTQEVFAQVKQIYKTPPIKDFGGNFSQILPDPSKPSKRSFIEDLLFNKVTLADAGFIKQYGDCLGDIAARDLICAQKFNGLTVLPPLLTDEMIAQYTSALLAGTITSGWTFGAGAALQIPFAMQMAYRFNGIGVTQNVLYENQKLIANQFNSAIGKIQDSLSSTASALGKLQDVVNQNAQALNTLVKQLSSNFGAISSVLNDILSRLDPPEAEVQIDRLITGRLQSLQTYVTQQLIRAAEIRASANLAATKMSECVLGQSKRVDFCGKGYHLMSFPQSAPHGVVFLHVTYVPAQEKNFTTAPAICHDGKAHFPREGVFVSNGTHWFVTQRNFYEPQIITTDNTFVSGNCDVVIGIVNNTVYDPLQPELDSFKEELDKYFKNHTSPDVDLGDISGINASVVNIQKEIDRLNEVAKNLNESLIDLQELGKYEQYIKWPWYIWLGFIAGLIAIVMVTIMLCCMTSCCSCLKGCCSCGSCCKFDEDDSEPVLKGVKLHYT

SEQ ID NO: 145 - DNA, 3812 bp, synthetic construct
  misc_feature 1..3812: note = modified coronavirus S polypeptide
  source 1..3812: mol_type = other DNA
atgttcgtcttcctggtgctgctgcctctggtgtccagccagtgcgtgaacttcaccactaggactcagctgcctcccgcttacaccaactcattcactaggggtgtgtactacccagacaaggtcttccgctcctcagtgctgcactcaactcaggacctgttcctgcctttcttctccaacgtcacctggttccacgctatccacgtgtccggcaccaacggcactaagaggttcgccaaccccgtgctgccattcaacgacggagtctacttcgcttcaaccgagaagtccaacatcatcagaggatggatcttcggcaccactctggacagcaagactcagtctctgctgatcgtcaacaacgctaccaacgtggtcatcaaggtgtgcgaattccagttctgtaacgaccccttcctgggtgtctactaccacaagaacaacaagtcatggatggagtccgaattccgcgtctactccagcgctaacaactgcactttcgagtacgtgtcccagccattcctgatggacctggaaggaaagcagggtaacttcaagaacctgcgcgagttcgtgttcaagaacatcgacggctacttcaagatttacagcaagcacacccccatcaacctggtccgtggcctgccacagggattctctgctctggagcccctggtggacctgccaatcggcatcaacatcaccaggttccagactctgcacagatcctacctgactcccggagactcttcatccggttggaccgctggcgctgccgcttactacgtgggttacctgcagccacgcaccttcctgctgaagtacaacgaaaacggcaccatcactgacgccgtcgactgcgctctggacccactgtcagaaaccaagtgcactctgaagtccttcaccgtggagaagggaatctaccagacttcaaacttccgcgtgcagcctaccgaatccatcgtccgtttcccaaacatcactaacctgtgccctttcggagaggtcttcaacgccacccgcttcgcttccgtgtacgcctggaaccgcaagcgtatctcaaactgcgtcgctgactactccgtgctgtacaactcagcctccttcagcaccttcaagtgctacggagtgtcacccactaagctgaacgacctgtgcttcaccaacgtctacgctgactccttcgtgatccgcggtgacgaggtccgtcagatcgctccaggccagactggaaacatcgccgactacaactacaagctgcctgacgacttcaccggttgcgtcatcgcctggaacagcaacaacctggactctaaagtgggtggcaactacaactacctgtacaggctgttcagaaagtcaaacctgaagcccttcgagcgcgacatcagcactgaaatctaccaggctggttctaccccatgcaacggtgtcaagggcttcaactgctacttccctctgcagtcctacggcttccagcccacttacggtgtgggctaccagccataccgtgtggtcgtgctgagcttcgagctgctgcacgcccctgctactgtgtgcggacccaagaagtctaccaacctggtcaagaacaagtgcgtgaacttcaacttcaacggtctgaccggaactggtgtcctgaccgagagcaacaagaagttcctgcctttccagcagttcggtcgcgacatcgctgacaccactgacgccgtgcgtgaccctcagaccctggaaatcctggacatcactccctgctcattcggaggtgtctccgtgatcactcccggaaccaacacttctaaccaggtcgctgtgctgtaccagggtgtgaactgcaccgaagtcccagtggccatccacgctgaccagctgacccctacttggagggtgtactccaccggcagcaacgtcttccagactagagctggatgcctgatcggtgccgagcacgtcaacaacagctacgaatgcgacatccctatcggcgctggaatctgcgcctcttaccagacccagactaacagcccccagcaggctcagtctgtggcctctcagtcaatcatcgcctacaccatgtcactgggtgtcgaaaactccgtggcttactctaacaactcaatcgccatccctaccaacttcactatcagcgtgaccactgagatcctgcccgtcagcatgaccaagacttctgtggactgcactatgtacatctgcggcgacagcaccgaatgctctaacctgctgctgcagtacggttctttctgcacccagctgaaccgcgctctgactggcatcgccgtggagcaggacaagaacactcaggaagtcttcgctcaggtgaagcaaatctacaagaccccacctatcaaggacttcggcggattcaacttctcccagatcctgccagacccttccaagcccagcaagaggtctttcatcgaggacctgctgttcaacaaggtcactctggccgacgctggtttcatcaagcagtacggcgactgcctgggagacatcgctgctcgcgacctgatctgcgcccagaagttcaacggcctgaccgtgctgcccccactgctgactgacgaaatgatcgctcagtacactagcgccctgctggctggcaccatcacttcaggttggactttcggtgctggtgctgctctgcagatcccattcgctatgcagatggcctaccgtttcaacggaatcggtgtcacccagaacgtgctgtacgagaaccagaagctgatcgctaaccagttcaactcagccatcggcaagatccaggacagcctgagctctactgcctctgctctgggaaagctgcaggacgtcgtgaaccagaacgcccaggctctgaacaccctggtcaagcagctgtcatccaacttcggcgccatcagctctgtgctgaacgacatcctgtccaggctggaccctcccgaggctgaagtccagatcgacaggctgatcactggaagactgcagtcactgcagacctacgtgactcagcagctgatccgcgccgctgaaatccgtgcctccgctaacctggccgctaccaagatgagcgagtgcgtcctgggccagtctaagagagtggacttctgcggcaagggataccacctgatgtcattcccacagtccgcccctcacggagtcgtgttcctgcacgtcacctacgtgcccgctcaggagaagaacttcaccactgccccagctatctgccacgacggcaaggctcacttccctcgcgaaggagtcttcgtgagcaacggcacccactggttcgtcactcagcgtaacttctacgagccccagatcatcaccactgacaacactttcgtgtctggcaactgcgacgtggtcatcggtatcgtcaacaacaccgtgtacgaccctctgcagcccgagctggactcattcaaggaagagctggacaagtacttcaagaaccacacctcccctgacgtcgacctgggtgacatctcaggcatcaacgcctccgtcgtgaacatccagaaggagatcgaccgcctgaacgaagtggctaagaacctgaacgaaagcctgatcgacctgcaggagctgggcaagtacgaacagtacatcaagtggccatggtacatctggctgggattcatcgctggcctcatcgctatcgtgatggtgaccatcatgctgtgctgcatgacttcatgctgctcctgcctgaagggttgctgcagctgcggctcttgctgcaagttcgacgaggacgactctgaaccttcctgaagggagtgaagctgcactacacctaa

SEQ ID NO: 146 - protein, 1267 aa, synthetic construct
  REGION 1..1267: note = modified coronavirus S polypeptide
MFVFLVLLPLVSSQCVNFTTRTQLPPAYTNSFTRGVYYPDKVFRSSVLHSTQDLFLPFFSNVTWFHAIHVSGTNGTKRFANPVLPFNDGVYFASTEKSNIIRGWIFGTTLDSKTQSLLIVNNATNVVIKVCEFQFCNDPFLGVYYHKNNKSWMESEFRVYSSANNCTFEYVSQPFLMDLEGKQGNFKNLREFVFKNIDGYFKIYSKHTPINLVRGLPQGFSALEPLVDLPIGINITRFQTLHRSYLTPGDSSSGWTAGAAAYYVGYLQPRTFLLKYNENGTITDAVDCALDPLSETKCTLKSFTVEKGIYQTSNFRVQPTESIVRFPNITNLCPFGEVFNATRFASVYAWNRKRISNCVADYSVLYNSASFSTFKCYGVSPTKLNDLCFTNVYADSFVIRGDEVRQIAPGQTGNIADYNYKLPDDFTGCVIAWNSNNLDSKVGGNYNYLYRLFRKSNLKPFERDISTEIYQAGSTPCNGVKGFNCYFPLQSYGFQPTYGVGYQPYRVVVLSFELLHAPATVCGPKKSTNLVKNKCVNFNFNGLTGTGVLTESNKKFLPFQQFGRDIADTTDAVRDPQTLEILDITPCSFGGVSVITPGTNTSNQVAVLYQGVNCTEVPVAIHADQLTPTWRVYSTGSNVFQTRAGCLIGAEHVNNSYECDIPIGAGICASYQTQTNSPGGSVASQSIIAYTMSLGVENSVAYSNNSIAIPTNFTISVTTEILPVSMTKTSVDCTMYICGDSTECSNLLLQYGSFCTQLNRALTGIAVEQDKNTQEVFAQVKQIYKTPPIKDFGGNFSQILPDPSKPSKRSFIEDLLFNKVTLADAGFIKQYGDCLGDIAARDLICAQKFNGLTVLPPLLTDEMIAQYTSALLAGTITSGWTFGAGAALQIPFAMQMAYRFNGIGVTQNVLYENQKLIANQFNSAIGKIQDSLSSTASALGKLQDVVNQNAQALNTLVKQLSSNFGAISSVLNDILSRLDPPEAEVQIDRLITGRLQSLQTYVTQQLIRAAEIRASANLAATKMSECVLGQSKRVDFCGKGYHLMSFPQSAPHGVVFLHVTYVPAQEKNFTTAPAICHDGKAHFPREGVFVSNGTHWFVTQRNFYEPQIITTDNTFVSGNCDVVIGIVNNTVYDPLQPELDSFKEELDKYFKNHTSPDVDLGDISGINASVVNIQKEIDRLNEVAKNLNESLIDLQELGKYEQYIKWPWYIWLGFIAGLIAIVMVTIMLCCMTSCCSCLKGCCSCGSCCKFDEDDSEPVLKGVKLHYT

SEQ ID NO: 147 - protein, 1254 aa, synthetic construct
  REGION 1..1254: note = modified coronavirus S polypeptide
QCVNFTTRTQLPPAYTNSFTRGVYYPDKVFRSSVLHSTQDLFLPFFSNVTWFHAIHVSGTNGTKRFANPVLPFNDGVYFASTEKSNIIRGWIFGTTLDSKTQSLLIVNNATNVVIKVCEFQFCNDPFLGVYYHKNNKSWMESEFRVYSSANNCTFEYVSQPFLMDLEGKQGNFKNLREFVFKNIDGYFKIYSKHTPINLVRGLPQGFSALEPLVDLPIGINITRFQTLHRSYLTPGDSSSGWTAGAAAYYVGYLQPRTFLLKYNENGTITDAVDCALDPLSETKCTLKSFTVEKGIYQTSNFRVQPTESIVRFPNITNLCPFGEVFNATRFASVYAWNRKRISNCVADYSVLYNSASFSTFKCYGVSPTKLNDLCFTNVYADSFVIRGDEVRQIAPGQTGNIADYNYKLPDDFTGCVIAWNSNNLDSKVGGNYNYLYRLFRKSNLKPFERDISTEIYQAGSTPCNGVKGFNCYFPLQSYGFQPTYGVGYQPYRVVVLSFELLHAPATVCGPKKSTNLVKNKCVNFNFNGLTGTGVLTESNKKFLPFQQFGRDIADTTDAVRDPQTLEILDITPCSFGGVSVITPGTNTSNQVAVLYQGVNCTEVPVAIHADQLTPTWRVYSTGSNVFQTRAGCLIGAEHVNNSYECDIPIGAGICASYQTQTNSPGGSVASQSIIAYTMSLGVENSVAYSNNSIAIPTNFTISVTTEILPVSMTKTSVDCTMYICGDSTECSNLLLQYGSFCTQLNRALTGIAVEQDKNTQEVFAQVKQIYKTPPIKDFGGNFSQILPDPSKPSKRSFIEDLLFNKVTLADAGFIKQYGDCLGDIAARDLICAQKFNGLTVLPPLLTDEMIAQYTSALLAGTITSGWTFGAGAALQIPFAMQMAYRFNGIGVTQNVLYENQKLIANQFNSAIGKIQDSLSSTASALGKLQDVVNQNAQALNTLVKQLSSNFGAISSVLNDILSRLDPPEAEVQIDRLITGRLQSLQTYVTQQLIRAAEIRASANLAATKMSECVLGQSKRVDFCGKGYHLMSFPQSAPHGVVFLHVTYVPAQEKNFTTAPAICHDGKAHFPREGVFVSNGTHWFVTQRNFYEPQIITTDNTFVSGNCDVVIGIVNNTVYDPLQPELDSFKEELDKYFKNHTSPDVDLGDISGINASVVNIQKEIDRLNEVAKNLNESLIDLQELGKYEQYIKWPWYIWLGFIAGLIAIVMVTIMLCCMTSCCSCLKGCCSCGSCCKFDEDDSEPVLKGVKLHYT

SEQ ID NO: 148 - DNA, 3804 bp, synthetic construct
  misc_feature 1..3804: note = modified coronavirus S polypeptide
  source 1..3804: mol_type = other DNA
atgttcgtcttcctggtgctgctgcctctggtgtccagccagtgcgtgaacttcaccactaggactcagctgcctcccgcttacaccaactcattcactaggggtgtgtactacccagacaaggtcttccgctcctcagtgctgcactcaactcaggacctgttcctgcctttcttctccaacgtcacctggttccacgctatccacgtgtccggcaccaacggcactaagaggttcgccaaccccgtgctgccattcaacgacggagtctacttcgcttcaaccgagaagtccaacatcatcagaggatggatcttcggcaccactctggacagcaagactcagtctctgctgatcgtcaacaacgctaccaacgtggtcatcaaggtgtgcgaattccagttctgtaacgaccccttcctgggtgtctactaccacaagaacaacaagtcatggatggagtccgaattccgcgtctactccagcgctaacaactgcactttcgagtacgtgtcccagccattcctgatggacctggaaggaaagcagggtaacttcaagaacctgcgcgagttcgtgttcaagaacatcgacggctacttcaagatttacagcaagcacacccccatcaacctggtccgtggcctgccacagggattctctgctctggagcccctggtggacctgccaatcggcatcaacatcaccaggttccagactctgcacagatcctacctgactcccggagactcttcatccggttggaccgctggcgctgccgcttactacgtgggttacctgcagccacgcaccttcctgctgaagtacaacgaaaacggcaccatcactgacgccgtcgactgcgctctggacccactgtcagaaaccaagtgcactctgaagtccttcaccgtggagaagggaatctaccagacttcaaacttccgcgtgcagcctaccgaatccatcgtccgtttcccaaacatcactaacctgtgccctttcggagaggtcttcaacgccacccgcttcgcttccgtgtacgcctggaaccgcaagcgtatctcaaactgcgtcgctgactactccgtgctgtacaactcagcctccttcagcaccttcaagtgctacggagtgtcacccactaagctgaacgacctgtgcttcaccaacgtctacgctgactccttcgtgatccgcggtgacgaggtccgtcagatcgctccaggccagactggaaacatcgccgactacaactacaagctgcctgacgacttcaccggttgcgtcatcgcctggaacagcaacaacctggactctaaagtgggtggcaactacaactacctgtacaggctgttcagaaagtcaaacctgaagcccttcgagcgcgacatcagcactgaaatctaccaggctggttctaccccatgcaacggtgtcaagggcttcaactgctacttccctctgcagtcctacggcttccagcccacttacggtgtgggctaccagccataccgtgtggtcgtgctgagcttcgagctgctgcacgcccctgctactgtgtgcggacccaagaagtctaccaacctggtcaagaacaagtgcgtgaacttcaacttcaacggtctgaccggaactggtgtcctgaccgagagcaacaagaagttcctgcctttccagcagttcggtcgcgacatcgctgacaccactgacgccgtgcgtgaccctcagaccctggaaatcctggacatcactccctgctcattcggaggtgtctccgtgatcactcccggaaccaacacttctaaccaggtcgctgtgctgtaccagggtgtgaactgcaccgaagtcccagtggccatccacgctgaccagctgacccctacttggagggtgtactccaccggcagcaacgtcttccagactagagctggatgcctgatcggtgccgagcacgtcaacaacagctacgaatgcgacatccctatcggcgctggaatctgcgcctcttaccagacccagactaacagcccaggtggttctgtggcctctcagtcaatcatcgcctacaccatgtcactgggtgtcgaaaactccgtggcttactctaacaactcaatcgccatccctaccaacttcactatcagcgtgaccactgagatcctgcccgtcagcatgaccaagacttctgtggactgcactatgtacatctgcggcgacagcaccgaatgctctaacctgctgctgcagtacggttctttctgcacccagctgaaccgcgctctgactggcatcgccgtggagcaggacaagaacactcaggaagtcttcgctcaggtgaagcaaatctacaagaccccacctatcaaggacttcggcggattcaacttctcccagatcctgccagacccttccaagcccagcaagaggtctttcatcgaggacctgctgttcaacaaggtcactctggccgacgctggtttcatcaagcagtacggcgactgcctgggagacatcgctgctcgcgacctgatctgcgcccagaagttcaacggcctgaccgtgctgcccccactgctgactgacgaaatgatcgctcagtacactagcgccctgctggctggcaccatcacttcaggttggactttcggtgctggtgctgctctgcagatcccattcgctatgcagatggcctaccgtttcaacggaatcggtgtcacccagaacgtgctgtacgagaaccagaagctgatcgctaaccagttcaactcagccatcggcaagatccaggacagcctgagctctactgcctctgctctgggaaagctgcaggacgtcgtgaaccagaacgcccaggctctgaacaccctggtcaagcagctgtcatccaacttcggcgccatcagctctgtgctgaacgacatcctgtccaggctggaccctcccgaggctgaagtccagatcgacaggctgatcactggaagactgcagtcactgcagacctacgtgactcagcagctgatccgcgccgctgaaatccgtgcctccgctaacctggccgctaccaagatgagcgagtgcgtcctgggccagtctaagagagtggacttctgcggcaagggataccacctgatgtcattcccacagtccgcccctcacggagtcgtgttcctgcacgtcacctacgtgcccgctcaggagaagaacttcaccactgccccagctatctgccacgacggcaaggctcacttccctcgcgaaggagtcttcgtgagcaacggcacccactggttcgtcactcagcgtaacttctacgagccccagatcatcaccactgacaacactttcgtgtctggcaactgcgacgtggtcatcggtatcgtcaacaacaccgtgtacgaccctctgcagcccgagctggactcattcaaggaagagctggacaagtacttcaagaaccacacctcccctgacgtcgacctgggtgacatctcaggcatcaacgcctccgtcgtgaacatccagaaggagatcgaccgcctgaacgaagtggctaagaacctgaacgaaagcctgatcgacctgcaggagctgggcaagtacgaacagtacatcaagtggccatggtacatctggctgggattcatcgctggcctcatcgctatcgtgatggtgaccatcatgctgtgctgcatgacttcatgctgctcctgcctgaagggttgctgcagctgcggctcttgctgcaagttcgacgaggacgactctgaacctgtcctgaagggagtgaagctgcactacacc

SEQ ID NO: 149 - protein, 1273 aa, synthetic construct
  REGION 1..1273: note = modified coronavirus S polypeptide
MFVFLVLLPLVSSQCVNFTNRTQLPSAYTNSFTRGVYYPDKVFRSSVLHSTQDLFLPFFSNVTWFHAIHVSGTNGTKRFDNPVLPFNDGVYFASTEKSNIIRGWIFGTTLDSKTQSLLIVNNATNVVIKVCEFQFCNYPFLGVYYHKNNKSWMESEFRVYSSANNCTFEYVSQPFLMDLEGKQGNFKNLSEFVFKNIDGYFKIYSKHTPINLVRDLPQGFSALEPLVDLPIGINITRFQTLLALHRSYLTPGDSSSGWTAGAAAYYVGYLQPRTFLLKYNENGTITDAVDCALDPLSETKCTLKSFTVEKGIYQTSNFRVQPTESIVRFPNITNLCPFGEVFNATRFASVYAWNRKRISNCVADYSVLYNSASFSTFKCYGVSPTKLNDLCFTNVYADSFVIRGDEVRQIAPGQTGTIADYNYKLPDDFTGCVIAWNSNNLDSKVGGNYNYLYRLFRKSNLKPFERDISTEIYQAGSTPCNGVKGFNCYFPLQSYGFQPTYGVGYQPYRVVVLSFELLHAPATVCGPKKSTNLVKNKCVNFNFNGLTGTGVLTESNKKFLPFQQFGRDIADTTDAVRDPQTLEILDITPCSFGGVSVITPGTNTSNQVAVLYQGVNCTEVPVAIHADQLTPTWRVYSTGSNVFQTRAGCLIGAEYVNNSYECDIPIGAGICASYQTQTNSPQQAQSVASQSIIAYTMSLGAENSVAYSNNSIAIPTNFTISVTTEILPVSMTKTSVDCTMYICGDSTECSNLLLQYGSFCTQLNRALTGIAVEQDKNTQEVFAQVKQIYKTPPIKDFGGFNFSQILPDPSKPSKRSFIEDLLFNKVTLADAGFIKQYGDCLGDIAARDLICAQKFNGLTVLPPLLTDEMIAQYTSALLAGTITSGWTFGAGAALQIPFAMQMAYRFNGIGVTQNVLYENQKLIANQFNSAIGKIQDSLSSTASALGKLQDVVNQNAQALNTLVKQLSSNFGAISSVLNDILSRLDPPEAEVQIDRLITGRLQSLQTYVTQQLIRAAEIRASANLAAIKMSECVLGQSKRVDFCGKGYHLMSFPQSAPHGVVFLHVTYVPAQEKNFTTAPAICHDGKAHFPREGVFVSNGTHWFVTQRNFYEPQIITTDNTFVSGNCDVVIGIVNNTVYDPLQPELDSFKEELDKYFKNHTSPDVDLGDISGINASFVNIQKEIDRLNEVAKNLNESLIDLQELGKYEQYIKWPWYIWLGFIAGLIAIVMVTIMLCCMTSCCSCLKGCCSCGSCCKFDEDDSEPVLKGVKLHYT

SEQ ID NO: 150 - DNA, 3822 bp, synthetic construct
  misc_feature 1..3822: note = modified coronavirus S polypeptide
  source 1..3822: mol_type = other DNA
atgttcgtcttcctggtgctgctgcctctggtgtccagccagtgcgtgaacttcaccaaccgcactcagctgcctagcgcttacaccaactctttcactaggggtgtgtactaccccgacaaggtcttccgctcctcagtgctgcactctactcaggacctgttcctgcccttcttctctaacgtcacctggttccacgccatccacgtgagcggcaccaacggcactaagaggttcgacaacccagtgctgcctttcaacgacggtgtctacttcgcttcaaccgagaagtccaacatcatcagaggatggatcttcggcaccactctggacagcaagactcagtctctgctgatcgtcaacaacgccaccaacgtggtcatcaaggtgtgcgaattccagttctgcaactacccattcctgggcgtctactaccacaagaacaacaagtcatggatggagtccgaattccgcgtctactccagcgctaacaactgcactttcgagtacgtgtcccagcctttcctgatggacctggaaggaaagcagggtaacttcaagaacctgtcagagttcgtgttcaagaacatcgacggatacttcaagatttactccaagcacaccccaatcaacctggtccgtgacctgcctcagggtttctcagctctggagccactggtggacctgcctatcggcatcaacatcaccaggttccagactctgctggctctgcacagatcctacctgactccaggtgactcatcttctggatggactgctggagctgctgcttactacgtgggttacctgcagcctcgcaccttcctgctgaagtacaacgaaaacggcaccatcactgacgccgtcgactgcgctctggaccctctgagcgaaaccaagtgcactctgaagtctttcaccgtggagaagggtatctaccagactagcaacttccgcgtgcagcccaccgaatctatcgtccgtttccctaacatcactaacctgtgccccttcggcgaggtcttcaacgccacccgtttcgcttccgtgtacgcctggaaccgcaagcgtatcagcaactgcgtcgctgactactctgtgctgtacaactcagcctccttcagcactttcaagtgctacggtgtgagccctactaagctgaacgacctgtgcttcaccaacgtctacgccgactctttcgtgatccgcggcgacgaggtccgtcagatcgctccaggccagaccggaactatcgccgactacaactacaagctgcctgacgacttcaccggctgcgtcatcgcttggaactcaaacaacctggactccaaagtgggtggcaactacaactacctgtacaggctgttcagaaagtcaaacctgaagcccttcgagagggacatctcaactgaaatctaccaggccggctccaccccatgcaacggtgtcaagggcttcaactgctacttccccctgcagtcctacggattccagccaacttacggtgtgggctaccagccttacagagtggtcgtgctgtcattcgaactcctccacgctcctgctactgtgtgcggaccaaagaagtccaccaacctggtcaagaacaagtgcgtgaacttcaacttcaacggtctgaccggaactggtgtcctgaccgagtcaaacaagaagttcctgcccttccagcagttcggtcgcgacatcgctgacactaccgacgccgtgcgtgacccccagaccctggaaatcctggacatcactccatgcagcttcggaggtgtctctgtgatcactccaggaaccaacacttccaaccaggtcgctgtgctgtaccagggtgtcaactgcaccgaagtccctgtggccatccacgctgaccagctgacccccacttggagggtgtactccaccggcagcaacgtcttccagactagagctggttgcctgatcggcgccgagtacgtgaacaactcatacgaatgcgacatccctatcggcgctggaatctgcgcctcctaccagacccagactaactcaccccagcaggctcagtccgtcgcctctcagtcaatcatcgcttacaccatgagcctgggcgctgaaaactctgtggcctactctaacaactcaatcgccatccccaccaacttcactatcagcgtgaccactgagatcctgccagtctcaatgaccaagacttccgtggactgcactatgtacatctgcggagacagcaccgaatgctctaacctgctgctgcagtacggctctttctgcacccagctgaacagggctctgactggaatcgccgtggagcaggacaagaacactcaggaagtcttcgctcaggtgaagcaaatctacaagacccctcccatcaaggacttcggcggattcaacttctcccagatcctgcctgacccctccaagcccagcaagcgctctttcatcgaggacctgctgttcaacaaggtcaccctggccgacgctggcttcatcaagcagtacggagactgcctgggtgacatcgccgctcgtgacctgatctgcgctcagaagttcaacggactgaccgtgctgccacctctgctgactgacgaaatgatcgcccagtacacttcagccctgctggctggaaccatcacttctggttggaccttcggtgctggtgctgctctgcagatcccattcgctatgcagatggcctaccgcttcaacggaatcggtgtcacccagaacgtgctgtacgagaaccagaagctgatcgctaaccagttcaacagcgccatcggcaagatccaggactcactgagctctactgcctccgctctgggaaagctgcaggacgtcgtgaaccagaacgcccaggctctgaacaccctggtcaagcagctgtcatccaacttcggagctatcagctctgtgctgaacgacatcctctcccgcctggaccctcctgaggctgaagtccagatcgacaggctgatcactggtagactgcagagcctgcagacctacgtgactcagcagctgatccgcgccgctgaaatccgtgcctctgctaacctggctgctatcaagatgtcagagtgcgtcctgggacagtccaagagagtggacttctgcggcaagggataccacctgatgtcattccctcagtccgctccccacggtgtcgtgttcctgcacgtcacctacgtgccagcccaggagaagaacttcaccactgcccctgctatctgccacgacggcaaggctcacttcccccgcgaaggtgtcttcgtgagcaacggcacccactggttcgtcactcagcgtaacttctacgagccacagatcatcaccactgacaacactttcgtgtctggaaactgcgacgtggtcatcggtatcgtcaacaacaccgtgtacgaccccctgcagccagagctggacagcttcaaggaagagctggacaagtacttcaagaaccacacctctcccgacgtggacctgggcgacatcagcggaatcaacgcttctttcgtcaacatccagaaggagatcgaccgtctgaacgaagtggccaagaacctgaacgaatcactgatcgacctgcaggagctgggcaagtacgaacagtacatcaagtggccatggtacatctggctgggtttcatcgctggcctcatcgctatcgtgatggtgaccatcatgctgtgctgcatgacttcatgctgctcctgcctgaagggctgctgcagctgcggatcttgctgcaagttcgacgaggacgactccgaacctgtcctgaagggagtgaagctgcactacacctaa

SEQ ID NO: 151 - protein, 1260 aa, synthetic construct
  REGION 1..1260: note = modified coronavirus S polypeptide
QCVNFTNRTQLPSAYTNSFTRGVYYPDKVFRSSVLHSTQDLFLPFFSNVTWFHAIHVSGTNGTKRFDNPVLPFNDGVYFASTEKSNIIRGWIFGTTLDSKTQSLLIVNNATNVVIKVCEFQFCNYPFLGVYYHKNNKSWMESEFRVYSSANNCTFEYVSQPFLMDLEGKQGNFKNLSEFVFKNIDGYFKIYSKHTPINLVRDLPQGFSALEPLVDLPIGINITRFQTLLALHRSYLTPGDSSSGWTAGAAAYYVGYLQPRTFLLKYNENGTITDAVDCALDPLSETKCTLKSFTVEKGIYQTSNFRVQPTESIVRFPNITNLCPFGEVFNATRFASVYAWNRKRISNCVADYSVLYNSASFSTFKCYGVSPTKLNDLCFTNVYADSFVIRGDEVRQIAPGQTGTIADYNYKLPDDFTGCVIAWNSNNLDSKVGGNYNYLYRLFRKSNLKPFERDISTEIYQAGSTPCNGVKGFNCYFPLQSYGFQPTYGVGYQPYRVVVLSFELLHAPATVCGPKKSTNLVKNKCVNFNFNGLTGTGVLTESNKKFLPFQQFGRDIADTTDAVRDPQTLEILDITPCSFGGVSVITPGTNTSNQVAVLYQGVNCTEVPVAIHADQLTPTWRVYSTGSNVFQTRAGCLIGAEYVNNSYECDIPIGAGICASYQTQTNSPQQAQSVASQSIIAYTMSLGAENSVAYSNNSIAIPTNFTISVTTEILPVSMTKTSVDCTMYICGDSTECSNLLLQYGSFCTQLNRALTGIAVEQDKNTQEVFAQVKQIYKTPPIKDFGGFNFSQILPDPSKPSKRSFIEDLLFNKVTLADAGFIKQYGDCLGDIAARDLICAQKFNGLTVLPPLLTDEMIAQYTSALLAGTITSGWTFGAGAALQIPFAMQMAYRFNGIGVTQNVLYENQKLIANQFNSAIGKIQDSLSSTASALGKLQDVVNQNAQALNTLVKQLSSNFGAISSVLNDILSRLDPPEAEVQIDRLITGRLQSLQTYVTQQLIRAAEIRASANLAAIKMSECVLGQSKRVDFCGKGYHLMSFPQSAPHGVVFLHVTYVPAQEKNFTTAPAICHDGKAHFPREGVFVSNGTHWFVTQRNFYEPQIITTDNTFVSGNCDVVIGIVNNTVYDPLQPELDSFKEELDKYFKNHTSPDVDLGDISGINASFVNIQKEIDRLNEVAKNLNESLIDLQELGKYEQYIKWPWYIWLGFIAGLIAIVMVTIMLCCMTSCCSCLKGCCSCGSCCKFDEDDSEPVLKGVKLHYT

SEQ ID NO: 152 - protein, 1273 aa, synthetic construct
  REGION 1..1273: note = modified coronavirus S polypeptide
MFVFLVLLPLVSIQCVNLTTRTQLPPAYTNSFTRGVYYPDKVFRSSVLHSTQDLFLPFFSNVTWFHAIHVSGTNGTKRFDNPVLPFNDGVYFASTEKSNIIRGWIFGTTLDSKTQSLLIVNNATNVVIKVCEFQFCNDPFLGVYYHKNNKSCMESEFRVYSSANNCTFEYVSQPFLMDLEGKQGNFKNLREFVFKNIDGYFKIYSKHTPINLVRDLPQGFSALEPLVDLPIGINITRFQTLLALHRSYLTPGDSSSGWTAGAAAYYVGYLQPRTFLLKYNENGTITDAVDCALDPLSETKCTLKSFTVEKGIYQTSNFRVQPTESIVRFPNITNLCPFGEVFNATRFASVYAWNRKRISNCVADYSVLYNSASFSTFKCYGVSPTKLNDLCFTNVYADSFVIRGDEVRQIAPGQTGKIADYNYKLPDDFTGCVIAWNSNNLDSKVGGNYNYRYRLFRKSNLKPFERDISTEIYQAGSTPCNGVEGFNCYFPLQPYGFQPTNGVGYQPYRVVVLSFELLHAPATVCGPKKSTNLVKNKCVNFNFNGLTGTGVLTESNKKFLPFQQFGRDIADTTDAVRDPQTLEILDITPCSFGGVSVITPGTNTSNQVAVLYQGVNCTEVPVAIHADQLTPTWRVYSTGSNVFQTRAGCLIGAEHVNNSYECDIPIGAGICASYQTQTNSPQQAQSVASQSIIAYTMSLGAENSVAYSNNSIAIPTNFTISVTTEILPVSMTKTSVDCTMYICGDSTECSNLLLQYGSFCTQLNRALTGIAVEQDKNTQEVFAQVKQIYKTPPIKDFGGFNFSQILPDPSKPSKRSFIEDLLFNKVTLADAGFIKQYGDCLGDIAARDLICAQKFNGLTVLPPLLTDEMIAQYTSALLAGTITSGWTFGAGAALQIPFAMQMAYRFNGIGVTQNVLYENQKLIANQFNSAIGKIQDSLSSTASALGKLQDVVNQNAQALNTLVKQLSSNFGAISSVLNDILSRLDPPEAEVQIDRLITGRLQSLQTYVTQQLIRAAEIRASANLAATKMSECVLGQSKRVDFCGKGYHLMSFPQSAPHGVVFLHVTYVPAQEKNFTTAPAICHDGKAHFPREGVFVSNGTHWFVTQRNFYEPQIITTDNTFVSGNCDVVIGIVNNTVYDPLQPELDSFKEELDKYFKNHTSPDVDLGDISGINASVVNIQKEIDRLNEVAKNLNESLIDLQELGKYEQYIKWPWYIWLGFIAGLIAIVMVTIMLCCMTSCCSCLKGCCSCGSCCKFDEDDSEPVLKGVKLHYT

SEQ ID NO: 153 - protein, 1260 aa, synthetic construct
  REGION 1..1260: note = modified coronavirus S polypeptide
QCVNLTTRTQLPPAYTNSFTRGVYYPDKVFRSSVLHSTQDLFLPFFSNVTWFHAIHVSGTNGTKRFDNPVLPFNDGVYFASTEKSNIIRGWIFGTTLDSKTQSLLIVNNATNVVIKVCEFQFCNDPFLGVYYHKNNKSCMESEFRVYSSANNCTFEYVSQPFLMDLEGKQGNFKNLREFVFKNIDGYFKIYSKHTPINLVRDLPQGFSALEPLVDLPIGINITRFQTLLALHRSYLTPGDSSSGWTAGAAAYYVGYLQPRTFLLKYNENGTITDAVDCALDPLSETKCTLKSFTVEKGIYQTSNFRVQPTESIVRFPNITNLCPFGEVFNATRFASVYAWNRKRISNCVADYSVLYNSASFSTFKCYGVSPTKLNDLCFTNVYADSFVIRGDEVRQIAPGQTGKIADYNYKLPDDFTGCVIAWNSNNLDSKVGGNYNYRYRLFRKSNLKPFERDISTEIYQAGSTPCNGVEGFNCYFPLQPYGFQPTNGVGYQPYRVVVLSFELLHAPATVCGPKKSTNLVKNKCVNFNFNGLTGTGVLTESNKKFLPFQQFGRDIADTTDAVRDPQTLEILDITPCSFGGVSVITPGTNTSNQVAVLYQGVNCTEVPVAIHADQLTPTWRVYSTGSNVFQTRAGCLIGAEHVNNSYECDIPIGAGICASYQTQTNSPQQAQSVASQSIIAYTMSLGAENSVAYSNNSIAIPTNFTISVTTEILPVSMTKTSVDCTMYICGDSTECSNLLLQYGSFCTQLNRALTGIAVEQDKNTQEVFAQVKQIYKTPPIKDFGGFNFSQILPDPSKPSKRSFIEDLLFNKVTLADAGFIKQYGDCLGDIAARDLICAQKFNGLTVLPPLLTDEMIAQYTSALLAGTITSGWTFGAGAALQIPFAMQMAYRFNGIGVTQNVLYENQKLIANQFNSAIGKIQDSLSSTASALGKLQDVVNQNAQALNTLVKQLSSNFGAISSVLNDILSRLDPPEAEVQIDRLITGRLQSLQTYVTQQLIRAAEIRASANLAATKMSECVLGQSKRVDFCGKGYHLMSFPQSAPHGVVFLHVTYVPAQEKNFTTAPAICHDGKAHFPREGVFVSNGTHWFVTQRNFYEPQIITTDNTFVSGNCDVVIGIVNNTVYDPLQPELDSFKEELDKYFKNHTSPDVDLGDISGINASVVNIQKEIDRLNEVAKNLNESLIDLQELGKYEQYIKWPWYIWLGFIAGLIAIVMVTIMLCCMTSCCSCLKGCCSCGSCCKFDEDDSEPVLKGVKLHYT

SEQ ID NO: 154 - protein, 13 aa, synthetic construct
  REGION 1..13: note = N-terminal signal peptide
MFVFFVLLPLVSS

SEQ ID NO: 155 - protein, 1273 aa, synthetic construct
  REGION 1..1273: note = modified coronavirus S polypeptide
MFVFFVLLPLVSSQCVNLTTRTQLPPAYTNSFTRGVYYPDKVFRSSVLHSTQDLFLPFFSNVTWFHAIHVSGTNGTKRFDNPVLPFNDGVYFASIEKSNIIRGWIFGTTLDSKTQSLLIVNNATNVVIKVCEFQFCNDPFLGVYYHKNNKSWMESEFRVYSSANNCTFEYVSQPFLMDLEGKQGNFKNLREFVFKNIDGYFKIYSKHTPINLVRDLPQGFSALEPLVDLPIGINITRFQTLLALHRSYLTPGGSSSGWTAGAAAYYVGYLQPRTFLLKYNENGTITDAVDCALDPLSETKCTLKSFTVEKGIYQTSNFRVQPTESIVRFPNITNLCPFGEVFNATRFASVYAWNRKRISNCVADYSVLYNSASFSTFKCYGVSPTKLNDLCFTNVYADSFVIRGDEVRQIAPGQTGKIADYNYKLPDDFTGCVIAWNSNNLDSKVGGNYNYLYRLFRKSNLKPFERDISTEIYQAGSTPCNGVKGFNCYFPLQSYGFQPTNGVGYQPYRVVVLSFELLHAPATVCGPKKSTNLVKNKCVNFNFNGLTGTGVLTESNKKFLPFQQFGRDIADTTDAVRDPQTLEILDITPCSFGGVSVITPGTNTSNQVAVLYQGVNCTEVPVAIHADQLTPTWRVYSTGSNVFQTRAGCLIGAEHVNNSYECDIPIGAGICASYQTQTNSPQQAQSVASQSIIAYTMSLGVENSVAYSNNSIAIPTNFTISVTTEILPVSMTKTSVDCTMYICGDSTECSNLLLQYGSFCTQLNRALTGIAVEQDKNTQEVFAQVKQIYKTPPIKDFGGFNFSQILPDPSKPSKRSFIEDLLFNKVTLADAGFIKQYGDCLGDIAARDLICAQKFNGLTVLPPLLTDEMIAQYTSALLAGTITSGWTFGAGAALQIPFAMQMAYRFNGIGVTQNVLYENQKLIANQFNSAIGKIQDSLSSTASALGKLQDVVNQNAQALNTLVKQLSSNFGAISSVLNDILSRLDPPEAEVQIDRLITGRLQSLQTYVTQQLIRAAEIRASANLAATKMSECVLGQSKRVDFCGKGYHLMSFPQSAPHGVVFLHVTYVPAQEKNFTTAPAICHDGKAHFPREGVFVSNGTHWFVTQRNFYEPQIITTDNTFVSGNCDVVIGIVNNTVYDPLQPELDSFKEELDKYFKNHTSPDVDLGDISGINASVVNIQKEIDRLNEVAKNLNESLIDLQELGKYEQYIKWPWYIWLGFIAGLIAIVMVTIMLCCMTSCCSCLKGCCSCGSCCKFDEDDSEPVLKGVKLHYT

SEQ ID NO: 156 - protein, 1260 aa, synthetic construct
  REGION 1..1260: note = modified coronavirus S polypeptide
QCVNLTTRTQLPPAYTNSFTRGVYYPDKVFRSSVLHSTQDLFLPFFSNVTWFHAIHVSGTNGTKRFDNPVLPFNDGVYFASIEKSNIIRGWIFGTTLDSKTQSLLIVNNATNVVIKVCEFQFCNDPFLGVYYHKNNKSWMESEFRVYSSANNCTFEYVSQPFLMDLEGKQGNFKNLREFVFKNIDGYFKIYSKHTPINLVRDLPQGFSALEPLVDLPIGINITRFQTLLALHRSYLTPGGSSSGWTAGAAAYYVGYLQPRTFLLKYNENGTITDAVDCALDPLSETKCTLKSFTVEKGIYQTSNFRVQPTESIVRFPNITNLCPFGEVFNATRFASVYAWNRKRISNCVADYSVLYNSASFSTFKCYGVSPTKLNDLCFTNVYADSFVIRGDEVRQIAPGQTGKIADYNYKLPDDFTGCVIAWNSNNLDSKVGGNYNYLYRLFRKSNLKPFERDISTEIYQAGSTPCNGVKGFNCYFPLQSYGFQPTNGVGYQPYRVVVLSFELLHAPATVCGPKKSTNLVKNKCVNFNFNGLTGTGVLTESNKKFLPFQQFGRDIADTTDAVRDPQTLEILDITPCSFGGVSVITPGTNTSNQVAVLYQGVNCTEVPVAIHADQLTPTWRVYSTGSNVFQTRAGCLIGAEHVNNSYECDIPIGAGICASYQTQTNSPQQAQSVASQSIIAYTMSLGVENSVAYSNNSIAIPTNFTISVTTEILPVSMTKTSVDCTMYICGDSTECSNLLLQYGSFCTQLNRALTGIAVEQDKNTQEVFAQVKQIYKTPPIKDFGGFNFSQILPDPSKPSKRSFIEDLLFNKVTLADAGFIKQYGDCLGDIAARDLICAQKFNGLTVLPPLLTDEMIAQYTSALLAGTITSGWTFGAGAALQIPFAMQMAYRFNGIGVTQNVLYENQKLIANQFNSAIGKIQDSLSSTASALGKLQDVVNQNAQALNTLVKQLSSNFGAISSVLNDILSRLDPPEAEVQIDRLITGRLQSLQTYVTQQLIRAAEIRASANLAATKMSECVLGQSKRVDFCGKGYHLMSFPQSAPHGVVFLHVTYVPAQEKNFTTAPAICHDGKAHFPREGVFVSNGTHWFVTQRNFYEPQIITTDNTFVSGNCDVVIGIVNNTVYDPLQPELDSFKEELDKYFKNHTSPDVDLGDISGINASVVNIQKEIDRLNEVAKNLNESLIDLQELGKYEQYIKWPWYIWLGFIAGLIAIVMVTIMLCCMTSCCSCLKGCCSCGSCCKFDEDDSEPVLKGVKLHYT

SEQ ID NO: 157 - protein, 1273 aa, synthetic construct
  REGION 1..1273: note = modified coronavirus S polypeptide
MFVFFVLLPLVSSQCVNLTTRTQLPPAYTNSFTRGVYYPDKVFRSSVLHSTQDLFLPFFSNVTWFHAIHVSGTNGTKRFDNPVLPFNDGVYFASIEKSNIIRGWIFGTTLDSKTQSLLIVNNATNVVIKVCEFQFCNDPFLGVYYHKNNKSWMESEFRVYSSANNCTFEYVSQPFLMDLEGKQGNFKNLREFVFKNIDGYFKIYSKHTPINLVRDLPQGFSALEPLVDLPIGINITRFQTLLALHRSYLTPGGSSSGWTAGAAAYYVGYLQPRTFLLKYNENGTITDAVDCALDPLSETKCTLKSFTVEKGIYQTSNFRVQPTESIVRFPNITNLCPFGEVFNATRFASVYAWNRKRISNCVADYSVLYNSASFSTFKCYGVSPTKLNDLCFTNVYADSFVIRGDEVRQIAPGQTGKIADYNYKLPDDFTGCVIAWNSNNLDSKVGGNYNYLYRLFRKSNLKPFERDISTEIYQAGNTPCNGVEGFNCYFPLQSYGFQPTNGVGYQPYRVVVLSFELLHAPATVCGPKKSTNLVKNKCVNFNFNGLTGTGVLTESNKKFLPFQQFGRDIADTTDAVRDPQTLEILDITPCSFGGVSVITPGTNTSNQVAVLYQGVNCTEVPVAIHADQLTPTWRVYSTGSNVFQTRAGCLIGAEHVNNSYECDIPIGAGICASYQTQTNSPQQAQSVASQSIIAYTMSLGVENSVAYSNNSIAIPTNFTISVTTEILPVSMTKTSVDCTMYICGDSTECSNLLLQYGSFCTQLNRALTGIAVEQDKNTQEVFAQVKQIYKTPPIKDFGGFNFSQILPDPSKPSKRSFIEDLLFNKVTLADAGFIKQYGDCLGDIAARDLICAQKFNGLTVLPPLLTDEMIAQYTSALLAGTITSGWTFGAGAALQIPFAMQMAYRFNGIGVTQNVLYENQKLIANQFNSAIGKIQDSLSSTASALGKLQDVVNQNAQALNTLVKQLSSNFGAISSVLNDILSRLDPPEAEVQIDRLITGRLQSLQTYVTQQLIRAAEIRASANLAATKMSECVLGQSKRVDFCGKGYHLMSFPQSAPHGVVFLHVTYVPAQEKNFTTAPAICHDGKAHFPREGVFVSNGTHWFVTQRNFYEPQIITTDNTFVSGNCDVVIGIVNNTVYDPLQPELDSFKEELDKYFKNHTSPDVDLGDISGINASVVNIQKEIDRLNEVAKNLNESLIDLQELGKYEQYIKWPWYIWLGFIAGLIAIVMVTIMLCCMTSCCSCLKGCCSCGSCCKFDEDDSEPVLKGVKLHYT

SEQ ID NO: 158 - protein, 1260 aa, synthetic construct
  REGION 1..1260: note = modified coronavirus S polypeptide
QCVNLTTRTQLPPAYTNSFTRGVYYPDKVFRSSVLHSTQDLFLPFFSNVTWFHAIHVSGTNGTKRFDNPVLPFNDGVYFASIEKSNIIRGWIFGTTLDSKTQSLLIVNNATNVVIKVCEFQFCNDPFLGVYYHKNNKSWMESEFRVYSSANNCTFEYVSQPFLMDLEGKQGNFKNLREFVFKNIDGYFKIYSKHTPINLVRDLPQGFSALEPLVDLPIGINITRFQTLLALHRSYLTPGGSSSGWTAGAAAYYVGYLQPRTFLLKYNENGTITDAVDCALDPLSETKCTLKSFTVEKGIYQTSNFRVQPTESIVRFPNITNLCPFGEVFNATRFASVYAWNRKRISNCVADYSVLYNSASFSTFKCYGVSPTKLNDLCFTNVYADSFVIRGDEVRQIAPGQTGKIADYNYKLPDDFTGCVIAWNSNNLDSKVGGNYNYLYRLFRKSNLKPFERDISTEIYQAGNTPCNGVEGFNCYFPLQSYGFQPTNGVGYQPYRVVVLSFELLHAPATVCGPKKSTNLVKNKCVNFNFNGLTGTGVLTESNKKFLPFQQFGRDIADTTDAVRDPQTLEILDITPCSFGGVSVITPGTNTSNQVAVLYQGVNCTEVPVAIHADQLTPTWRVYSTGSNVFQTRAGCLIGAEHVNNSYECDIPIGAGICASYQTQTNSPQQAQSVASQSIIAYTMSLGVENSVAYSNNSIAIPTNFTISVTTEILPVSMTKTSVDCTMYICGDSTECSNLLLQYGSFCTQLNRALTGIAVEQDKNTQEVFAQVKQIYKTPPIKDFGGFNFSQILPDPSKPSKRSFIEDLLFNKVTLADAGFIKQYGDCLGDIAARDLICAQKFNGLTVLPPLLTDEMIAQYTSALLAGTITSGWTFGAGAALQIPFAMQMAYRFNGIGVTQNVLYENQKLIANQFNSAIGKIQDSLSSTASALGKLQDVVNQNAQALNTLVKQLSSNFGAISSVLNDILSRLDPPEAEVQIDRLITGRLQSLQTYVTQQLIRAAEIRASANLAATKMSECVLGQSKRVDFCGKGYHLMSFPQSAPHGVVFLHVTYVPAQEKNFTTAPAICHDGKAHFPREGVFVSNGTHWFVTQRNFYEPQIITTDNTFVSGNCDVVIGIVNNTVYDPLQPELDSFKEELDKYFKNHTSPDVDLGDISGINASVVNIQKEIDRLNEVAKNLNESLIDLQELGKYEQYIKWPWYIWLGFIAGLIAIVMVTIMLCCMTSCCSCLKGCCSCGSCCKFDEDDSEPVLKGVKLHYT

SEQ ID NO: 159 - protein, 1271 aa, synthetic construct
  REGION 1..1271: note = recombinant coronavirus Spike (S) polypeptide
MFVFLVLLPLVSSQCVNLTTRTQLPPAYTNSFTRGVYYPDKVFRSSVLHSTQDLFLPFFSNVTWFHVIHVSGTNGTKRFDNPVLPFNDGVYFASIEKSNIIRGWIFGTTLDSKTQSLLIVNNATNVVIKVCEFQFCNDPFLDVYYHKNNKSWMESEFRVYSSANNCTFEYVSQPFLMDLEGKQGNFKNLREFVFKNIDGYFKIYSKHTPINIVRDLPQGFSALEPLVDLPIGINITRFQTLLALHRSYLPGDSSSGWTAGAAAYYVGYLQPRTFLLKYNENGTITDAVDCALDPLSETKCTLKSFTVEKGIYQTSNFRVQPTESIVRFPNITNLCPFDEVFNATRFASVYAWNRKRISNCVADYSVLYNLAPFFTFKCYGVSPTKLNDLCFTNVYADSFVIRGDEVRQIAPGQTGNIADYNYKLPDDFTGCVIAWNSNKLDSKVSGNYNYLYRLFRKSNLKPFERDISTEIYQAGNKPCNGVAGFNCYFPLRSYSFRPTYGVGHQPYRVVVLSFELLHAPATVCGPKKSTNLVKNKCVNFNFNGLKGTGVLTESNKKFLPFQQFGRDIADTTDAVRDPQTLEILDITPCSFGGVSVITPGTNTSNQVAVLYQGVNCTEVPVAIHADQLTPTWRVYSTGSNVFQTRAGCLIGAEYVNNSYECDIPIGAGICASYQTQTKSHQQAQSVASQSIIAYTMSLGAENSVAYSNNSIAIPTNFTISVTTEILPVSMTKTSVDCTMYICGDSTECSNLLLQYGSFCTQLKRALTGIAVEQDKNTQEVFAQVKQIYKTPPIKYFGGFNFSQILPDPSKPSKRSFIEDLLFNKVTLADAGFIKQYGDCLGDIAARDLICAQKFKGLTVLPPLLTDEMIAQYTSALLAGTITSGWTFGAGAALQIPFAMQMAYRFNGIGVTQNVLYENQKLIANQFNSAIGKIQDSLSSTASALGKLQDVVNHNAQALNTLVKQLSSKFGAISSVLNDIFSRLDPPEAEVQIDRLITGRLQSLQTYVTQQLIRAAEIRASANLAATKMSECVLGQSKRVDFCGKGYHLMSFPQSAPHGVVFLHVTYVPAQEKNFTTAPAICHDGKAHFPREGVFVSNGTHWFVTQRNFYEPQIITTDNTFVSGNCDVVIGIVNNTVYDPLQPELDSFKELDKYFKNHTSPDVDLGDISGINASVVNIQKEIDRLNEVAKNLNESLIDLQELGKYEQYIKWPWYIWLGFIAGLIAIVMVTIMLCCMTSCCSCLKGCCSCGSCCKFDEDDSEPVLKGVKLHYT

SEQ ID NO: 160 - protein, 1270 aa, synthetic construct
  REGION 1..1270: note = recombinant coronavirus Spike (S) polypeptide
MFVFLVLLPLVSSQCVNLTTRTQLPPAYTNSFTRGVYYPDKVFRSSVLHSTQDLFLPFFSNVTWFHVISGTNGTKRFDNPVLPFNDGVYFASIEKSNIIRGWIFGTTLDSKTQSLLIVNNATNVVIKVCEFQFCNDPFLDHKNNKSWMESEFRVYSSANNCTFEYVSQPFLMDLEGKQGNFKNLREFVFKNIDGYFKIYSKHTPIIVREPEDLPQGFSALEPLVDLPIGINITRFQTLLALHRSYLTPGDSSSGWTAGAAAYYVGYLQPRTFLLKYNENGTITDAVDCALDPLSETKCTLKSFTVEKGIYQTSNFRVQPTESIVRFPNITNLCPFDEVFNATRFASVYAWNRKRISNCVADYSVLYNLAPFFTFKCYGVSPTKLNDLCFTNVYADSFVIRGDEVRQIAPGQTGNIADYNYKLPDDFTGCVIAWNSNKLDSKVSGNYNYLYRLFRKSNLKPFERDISTEIYQAGNKPCNGVAGFNCYFPLRSYSFRPTYGVGHQPYRVVVLSFELLHAPATVCGPKKSTNLVKNKCVNFNFNGLKGTGVLTESNKKFLPFQQFGRDIADTTDAVRDPQTLEILDITPCSFGGVSVITPGTNTSNQVAVLYQGVNCTEVPVAIHADQLTPTWRVYSTGSNVFQTRAGCLIGAEYVNNSYECDIPIGAGICASYQTQTKSHQQAQSVASQSIIAYTMSLGAENSVAYSNNSIAIPTNFTISVTTEILPVSMTKTSVDCTMYICGDSTECSNLLLQYGSFCTQLKRALTGIAVEQDKNTQEVFAQVKQIYKTPPIKYFGGFNFSQILPDPSKPSKRSFIEDLLFNKVTLADAGFIKQYGDCLGDIAARDLICAQKFKGLTVLPPLLTDEMIAQYTSALLAGTITSGWTFGAGAALQIPFAMQMAYRFNGIGVTQNVLYENQKLIANQFNSAIGKIQDSLSSTASALGKLQDVVNHNAQALNTLVKQLSSKFGAISSVLNDIFSRLDPPEAEVQIDRLITGRLQSLQTYVTQQLIRAAEIRASANLAATKMSECVLGQSKRVDFCGKGYHLMSFPQSAPHGVVFLHVTYVPAQEKNFTTAPAICHDGKAHFPREGVFVSNGTHWFVTQRNFYEPQIITTDNTFVSGNCDVVIGIVNNTVYDPLQPELDSFKEELDKYFKNHTSPDVDLGDISGINASVVNIQKEIDRLNEVAKNLNESLIDLQELGKYEQYIKWPWYIWLGFIAGLIAIVMVTIMLCCMTSCCSCLKGCCSCGSCCKFDEDDSEPVLKGVKLHYT

SEQ ID NO: 161 - DNA, 3819 bp, synthetic construct
  misc_feature 1..3819: note = encodes recombinant coronavirus Spike (S) polypeptide
  source 1..3819: mol_type = other DNA
atgtttgtattcttagtattgctgcccctagtgagcagccagtgtgttaatctgacgacgcggacccaacttcctccagcctacacaaactcttttacgcgcggggtctattacccggacaaagtgttccgttcgagtgttttgcatagcacccaggatttattcctaccattcttttcaaatgttacctggttccatgtgattcacgtctccggtactaatggaactaaacggttcgacaaccccgttttgccgttcaacgatggggtgtacttcgcttctattgagaagtcgaatatcatacgtgggtggattttcggcacgaccttggatagtaaaactcagtcgttacttatagtaaataatgctaccaatgttgtgattaaggtgtgtgagttccagttttgtaatgatccctttcttgacgtctattatcataaaaataacaaatcatggatggaatcggagtttcgggtgtattcctctgcgaacaactgtacatttgaatatgtgtctcagccgttcctgatggatttggagggtaagcaaggcaactttaagaatttgcgagagttcgtcttcaagaacatagatggatactttaaaatttatagcaagcacacaccgattaatatagtgcgagaccttcctcaaggtttctcggcccttgagccgctagtggacctgcccattggaattaatatcacccggtttcagactctgcttgcccttcatcgttcttatctgacccctggcgattcttcatcaggatggacggctggggctgccgcctattatgtcggataccttcaaccaaggacttttctcctcaagtataacgagaacggaacaattacagatgcagtcgattgcgccctagaccctctgtcggaaacgaagtgcaccttgaagagttttacagtagagaaggggatttaccagaccagtaacttcagggtccaaccgaccgaatccatcgtccgatttccaaatataactaatttatgtccgtttgacgaggtcttcaacgcaactcggttcgcgtcagtttatgcgtggaaccgcaaaagaataagcaactgcgtagctgactattccgttctctacaactctgcgccgttttttacttttaaatgctatggagtaagtccaacaaaattaaatgatctatgttttacaaatgtgtacgcagactcgtttgtaataaggggtgacgaagttcgtcagatagcaccagggcaaactgggaatattgcagactacaactataagctacccgatgacttcactggctgcgtcatcgcttggaatagtaataaattagatagtaaggtgagtgggaattataattacctatatcgtctctttagaaaaagtaacctcaagccattcgaacgcgacatttctacagaaatctatcaagctggcaataaaccttgcaacggtgtcgcgggcttcaactgctactttccccttaggtcgtactcttttcgacctacctatggtgtgggccaccagccctatagagttgttgtcctatcttttgaactattacatgccccagcgacggtatgcggacccaagaagtcgactaatttagtaaagaacaaatgcgttaattttaattttaatggccttaaagggacaggtgttttaacggaatcgaataaaaaattcttacctttccagcaatttggacgcgacatagctgatacgacggatgcagtcagagaccctcagacactggagatactggacataaccccgtgcagcttcgggggagtctccgtaataacccctgggacgaacacatccaatcaggtagcagtattatatcaaggcgtcaattgtacagaagttcctgtcgctatccatgcagatcaactcaccccgacctggcgcgtttatagcactgggagtaatgtattccaaactcgtgcaggatgtcttatcggggctgaatacgtgaataactcatacgagtgtgacattccaattggagctggcatatgtgccagctatcaaactcaaacgaagtcccaccaacaggcacagtctgtcgcgtctcaatcgatcattgcctatacaatgagtcttggtgccgaaaattcagttgcatatagcaacaactcaatagcgatacctactaatttcacaatcagtgtgaccaccgaaattctcccagtatcgatgacaaagacatccgtggattgtactatgtacatctgtggagactcgacggagtgctccaacttactccttcagtacgggtccttttgcactcaattaaagagggccctaacaggcattgctgttgagcaagacaagaacacgcaagaggtatttgcacaggtgaagcaaatatacaagacaccaccaattaagtactttggaggttttaacttctctcagatactcccagatcccagcaaaccctctaaacggagcttcatagaagacctcttgtttaataaagtgactttagctgatgcaggctttatcaagcaatatggggattgtttgggggatattgccgcccgcgacctcatctgcgcccagaaattcaagggtctaacagtattaccaccgctcctgacagacgagatgatcgctcaatacacttctgcgctgttggccgggacaattacgtctgggtggaccttcggcgcaggtgccgccttgcagatcccatttgcgatgcaaatggcgtatcgttttaacggtataggtgtcacacaaaacgtattatacgaaaaccagaaactaatagctaaccaatttaactcagcaataggaaaaatacaggattctctttcctctacggcgagcgccctcgggaaacttcaggatgtagtgaaccataacgctcaagcacttaataccctggttaagcaactatcaagcaagttcggtgctatctcatcagtgcttaatgacatcttcagtcgactagatcccccggaagcagaagttcaaatcgacagattgataactggccgcttgcaatctctacaaacatacgttacccagcagctgattcgggctgcggaaatccgagcatcggccaacctcgccgcgactaaaatgagcgagtgcgtattgggccagagtaaaagggttgacttctgcggtaagggctaccaccttatgagttttccgcagagtgcgcctcacggagttgtcttcctccacgtgacgtatgtgccggcacaggaaaaaaatttcaccaccgcccctgcgatatgtcatgatggtaaggcgcactttccaagagagggtgtctttgtttcaaatggaacccactggttcgttactcaacgtaatttttacgaacctcagattatcactacggataatacgttcgtgtcaggaaactgcgacgtggtaattggtatagtaaataatactgtgtatgatcccctccagccggagctggactcattcaaagaggaattagataagtacttcaaaaatcacacaagccctgatgtggacttgggagatatctcaggaattaacgcttccgttgtcaacatccaaaaagagatagacaggctgaatgaagtagcgaaaaacctgaacgaatccctgattgacttgcaagagctgggcaaatacgaacagtatattaaatggccctggtatatttggttggggttcatcgctggtttaatcgctattgttatggtcaccattatgctttgttgtatgacgtcctgttgttcttgtctaaagggctgctgttcgtgcggttcctgctgtaaattcgatgaggatgactccgaacccgttctgaaaggcgtcaagctccattatact

SEQ ID NO: 162 - DNA, 3810 bp, synthetic construct
  misc_feature 1..3810: note = encodes recombinant coronavirus Spike (S) polypeptide
  source 1..3810: mol_type = other DNA
atgtttgtttttctcgtactacttccactagtatctagccaatgtgtaaatttaaccacgaggacgcagctgcctccggcatatacgaatagtttcactaggggagtctattatccagataaagtgttccgaagcagtgttctacattcaacacaggacctcttccttcctttctttagcaacgtcacgtggttccatgtcataagcggcacaaacggcacaaagcgcttcgataatccggtgcttccgtttaacgatggggtttattttgcttctattgaaaagagcaacattatacgcggttggatcttcggaactacattggatagtaaaacgcaatcattgctaatcgttaataacgcgactaatgtagtgattaaggtgtgcgagttccagttttgcaatgacccctttttggatcataaaaataataaatcgtggatggaatcagaatttcgtgtatattcaagcgcaaacaactgtacgttcgagtacgtgagtcagcccttcttgatggatctggaagggaagcagggcaattttaaaaacttacgtgagtttgtatttaagaatatcgacgggtatttcaagatttactcaaagcacacaccgattattgttcgagagccggaagatttaccccaaggcttctcagcactggaacccttggtagacctacctatcggtattaatataacccgcttccaaaccttgttagcgctgcatcggagttatttaacccccggagactcatcgagcgggtggaccgccggggctgcagcttattacgtggggtatttacaaccacggacgttcttactcaagtacaacgagaacgggacgattactgatgccgtcgactgtgctttggacccgctgagcgaaaccaagtgcacactcaagtctttcacggtagagaaggggatctaccagacatcaaattttcgggtacaaccaacggagtccatcgtacgctttccgaatatcacgaatctttgtccattcgatgaggtattcaatgctacgcgttttgcgagtgtgtacgcgtggaataggaagcgtatctcaaattgcgtcgctgattactccgtactctataacagcgcgcccttctttaccttcaaatgctacggggtttctcctactaaactaaacgatctatgttttacgaacgtctacgcagacagctttgttatacgaggggacgaggttcggcagatcgcccccggccaaacaggaaacatcgccgactataattacaaactcccagatgactttactggttgcgtaattgcgtggaactctaacaagttagactccaaggtctcgggaaactacaattacctgtaccgtctcttcagaaaatctaacttaaagcctttcgagcgagatattagcactgaaatctatcaggcgggtaataaaccctgtaacggggtcgccggttttaactgctactttcctcttcggtcgtattcctttcgcccgacctatggagttggacaccaaccttatagagtcgttgttctaagttttgaattgctccatgccccggcgacggtatgcgggccaaagaaaagtactaatctcgttaagaataaatgtgtgaatttcaactttaacggacttaaaggtacgggcgtattgaccgagtcaaataaaaagtttttacccttccagcaatttggtagggatatcgcggatactactgacgcagtgagagatccacaaacacttgaaatcctagacatcaccccttgtagttttgggggagtgtctgtaatcacccctggtacaaacacttctaaccaagtcgcggttctttatcagggtgttaattgtacagaagtgcctgtcgccattcatgcagaccagctgacgcccacttggcgcgtctactcgacgggatctaatgtctttcagactcgagctggatgcctcatcggggcagaatacgtgaacaactcctatgaatgcgatattcctatcggtgctggcatttgcgcatcttatcaaacacagaccaaaagtcatcagcaagcgcaatccgttgccagtcaatctataattgcgtatacaatgtccttgggcgcggaaaattcagtcgcgtatagcaacaattctatcgctattccaacgaattttactatatcggtcacaacagagatactaccagtgtcgatgactaagacttcggtagattgcacaatgtacatatgcggagacagcacagaatgctcgaacctacttcttcaatatggttctttttgcactcagctcaagagagctcttactggcatagcagtggagcaagataaaaatacccaggaagtgtttgctcaagtaaaacagatatataaaacccctccgatcaaatattttggaggttttaacttctcacaaatactaccggacccttccaaaccatcgaaacggtccttcatagaggacttgctctttaataaggtaactttggcggatgctggttttataaagcagtatggagattgtcttggtgacatagcggccagagacctcatctgtgcacagaaattcaaaggtctaacagtacttccgcccctgctaacggacgagatgatagctcaatacaccagtgcccttctggctggaacgataaccagtggatggaccttcggcgcaggtgccgcactgcagattccgttcgcaatgcagatggcctatcggtttaatgggatcggcgtcactcaaaatgtattgtacgaaaatcagaaactcattgccaaccaattcaattcagcgataggcaagatccaggacagtctctcttccaccgcctccgccttaggtaagctacaagatgttgttaatcataacgctcaagcattgaatacgctggtaaaacaattgagcagcaaattcggcgcaattagctcagttttgaacgacatattctcccgacttgacccccccgaagctgaagtccaaatagataggctgataaccgggaggctacagtcactccaaacctacgtgactcaacagctcataagagcagccgaaataagagcctctgctaatctcgccgcgactaagatgtcagagtgtgttttaggtcaaagtaaaagggttgatttctgtggtaagggataccaccttatgtcctttccacaatcggctccacacggtgtggtctttctgcacgttacttatgtcccggctcaggagaagaatttcaccacagccccggctatttgtcatgacggcaaggcgcacttccccagagaaggcgtattcgtcagtaacggcactcactggttcgttactcaacgtaacttctacgaacctcagattataacgacagacaacacatttgtatcagggaactgtgatgtggtgatcggtatagtgaacaacacagtgtacgacccattacagccggagttagattctttcaaggaagagctggataagtacttcaagaatcacacctcgccagatgttgaccttggtgatatttcaggtataaacgcctctgtcgtgaatatccagaaagagatcgaccgtctcaacgaagtagcgaaaaatctaaacgaatcgttaattgaccttcaggagctggggaagtatgagcagtacattaagtggccctggtacatttggctgggctttattgcaggactgatagcaatagtgatggtcaccattatgttgtgctgcatgacatcctgctgctcttgtttaaaagggtgttgtagttgtggatcgtgttgcaagttcgacgaggatgattccgaacctgttctgaaaggcgtaaaattacactacaca

SEQ ID NO: 163 - DNA, 9308 bp, synthetic construct
  misc_feature 1..9308: note = encodes recombinant coronavirus Spike (S) polypeptide
  source 1..9308: mol_type = other DNA
ggaacggctccgcccactattaatgaaattaaaaattccaattttaaaaaacgcagcaagagaaacatttgtatgaaagaatgcgtagaaggaaagaaaaatgtcgtcgacatgctgaacaacaagattaatatgcctccgtgtataaaaaaaatattgaacgatttgaaagaaaacaatgtaccgcgcggcggtatgtacaggaagaggtttatactaaactgttacattgcaaacgtggtttcgtgtgccaagtgtgaaaaccgatgtttaatcaaggctctgacgcatttctacaaccacgactccaagtgtgtgggtgaagtcatgcatcttttaatcaaatcccaagatgtgtataaaccaccaaactgccaaaaaatgaaaactgtcgacaagctctgtccgtttgctggcaactgcaagggtctcaatcctatttgtaattattgaataataaaacaattataaatgctaaatttgttttttattaacgatacaaaccaaacgcaacaagaacatttgtagtattatctataattgaaaacgcgtagttataatcgctgaggtaatatttaaaatcattttcaaatgattcacagttaatttgcgacaatataattttattttcacataaactagacgccttgtcgtcttcttcttcgtattccttctctttttcatttttctcttcataaaaattaacatagttattatcgtatccatatatgtatctatcgtatagagtaaattttttgttgtcataaatatatatgtcttttttaatggggtgtatagtaccgctgcgcatagtttttctgtaatttacaacagtgctattttctggtagttcttcggagtgtgttgctttaattattaaatttatataatcaatgaatttgggatcgtcggttttgtacaatatgttgccggcatagtacgcagcttcttctagttcaattacaccattttttagcagcaccggattaacataactttccaaaatgttgtacgaaccgttaaacaaaaacagttcacctcccttttctatactattgtctgcgagcagttgtttgttgttaaaaataacagccattgtaatgagacgcacaaactaatatcacaaactggaaatgtctatcaatatatagttgctgatcagatctgatcatggagataattaaaatgataaccatctcgcaaataaataagtattttactgttttcgtaacagttttgtaataaaaaaacctataaatataggatccgccaccatgtttgtattcttagtattgctgcccctagtgagcagccagtgtgttaatctgacgacgcggacccaacttcctccagcctacacaaactcttttacgcgcggggtctattacccggacaaagtgttccgttcgagtgttttgcatagcacccaggatttattcctaccattcttttcaaatgttacctggttccatgtgattcacgtctccggtactaatggaactaaacggttcgacaaccccgttttgccgttcaacgatggggtgtacttcgcttctattgagaagtcgaatatcatacgtgggtggattttcggcacgaccttggatagtaaaactcagtcgttacttatagtaaataatgctaccaatgttgtgattaaggtgtgtgagttccagttttgtaatgatccctttcttgacgtctattatcataaaaataacaaatcatggatggaatcggagtttcgggtgtattcctctgcgaacaactgtacatttgaatatgtgtctcagccgttcctgatggatttggagggtaagcaaggcaactttaagaatttgcgagagttcgtcttcaagaacatagatggatactttaaaatttatagcaagcacacaccgattaatatagtgcgagaccttcctcaaggtttctcggcccttgagccgctagtggacctgcccattggaattaatatcacccggtttcagactctgcttgcccttcatcgttcttatctgacccctggcgattcttcatcaggatggacggctggggctgccgcctattatgtcggataccttcaaccaaggacttttctcctcaagtataacgagaacggaacaattacagatgcagtcgattgcgccctagaccctctgtcggaaacgaagtgcaccttgaagagttttacagtagagaaggggatttaccagaccagtaacttcagggtccaaccgaccgaatccatcgtccgatttccaaatataactaatttatgtccgtttgacgaggtcttcaacgcaactcggttcgcgtcagtttatgcgtggaaccgcaaaagaataagcaactgcgtagctgactattccgttctctacaactctgcgccgttttttacttttaaatgctatggagtaagtccaacaaaattaaatgatctatgttttacaaatgtgtacgcagactcgtttgtaataaggggtgacgaagttcgtcagatagcaccagggcaaactgggaatattgcagactacaactataagctacccgatgacttcactggctgcgtcatcgcttggaatagtaataaattagatagtaaggtgagtgggaattataattacctatatcgtctctttagaaaaagtaacctcaagccattcgaacgcgacatttctacagaaatctatcaagctggcaataaaccttgcaacggtgtcgcgggcttcaactgctactttccccttaggtcgtactcttttcgacctacctatggtgtgggccaccagccctatagagttgttgtcctatcttttgaactattacatgccccagcgacggtatgcggacccaagaagtcgactaatttagtaaagaacaaatgcgttaattttaattttaatggccttaaagggacaggtgttttaacggaatcgaataaaaaattcttacctttccagcaatttggacgcgacatagctgatacgacggatgcagtcagagaccctcagacactggagatactggacataaccccgtgcagcttcgggggagtctccgtaataacccctgggacgaacacatccaatcaggtagcagtattatatcaaggcgtcaattgtacagaagttcctgtcgctatccatgcagatcaactcaccccgacctggcgcgtttatagcactgggagtaatgtattccaaactcgtgcaggatgtcttatcggggctgaatacgtgaataactcatacgagtgtgacattccaattggagctggcatatgtgccagctatcaaactcaaacgaagtcccaccaacaggcacagtctgtcgcgtctcaatcgatcattgcctatacaatgagtcttggtgccgaaaattcagttgcatatagcaacaactcaatagcgatacctactaatttcacaatcagtgtgaccaccgaaattctcccagtatcgatgacaaagacatccgtggattgtactatgtacatctgtggagactcgacggagtgctccaacttactccttcagtacgggtccttttgcactcaattaaagagggccctaacaggcattgctgttgagcaagacaagaacacgcaagaggtatttgcacaggtgaagcaaatatacaagacaccaccaattaagtactttggaggttttaacttctctcagatactcccagatcccagcaaaccctctaaacggagcttcatagaagacctcttgtttaataaagtgactttagctgatgcaggctttatcaagcaatatggggattgtttgggggatattgccgcccgcgacctcatctgcgcccagaaattcaagggtctaacagtattaccaccgctcctgacagacgagatgatcgctcaatacacttctgcgctgttggccgggacaattacgtctgggtggaccttcggcgcaggtgccgccttgcagatcccatttgcgatgcaaatggcgtatcgttttaacggtataggtgtcacacaaaacgtattatacgaaaaccagaaactaatagctaaccaatttaactcagcaataggaaaaatacaggattctctttcctctacggcgagcgccctcgggaaacttcaggatgtagtgaaccataacgctcaagcacttaataccctggttaagcaactatcaagcaagttcggtgctatctcatcagtgcttaatgacatcttcagtcgactagatcccccggaagcagaagttcaaatcgacagattgataactggccgcttgcaatctctacaaacatacgttacccagcagctgattcgggctgcggaaatccgagcatcggccaacctcgccgcgactaaaatgagcgagtgcgtattgggccagagtaaaagggttgacttctgcggtaagggctaccaccttatgagttttccgcagagtgcgcctcacggagttgtcttcctccacgtgacgtatgtgccggcacaggaaaaaaatttcaccaccgcccctgcgatatgtcatgatggtaaggcgcactttccaagagagggtgtctttgtttcaaatggaacccactggttcgttactcaacgtaatttttacgaacctcagattatcactacggataatacgttcgtgtcaggaaactgcgacgtggtaattggtatagtaaataatactgtgtatgatcccctccagccggagctggactcattcaaagaggaattagataagtacttcaaaaatcacacaagccctgatgtggacttgggagatatctcaggaattaacgcttccgttgtcaacatccaaaaagagatagacaggctgaatgaagtagcgaaaaacctgaacgaatccctgattgacttgcaagagctgggcaaatacgaacagtatattaaatggccctggtatatttggttggggttcatcgctggtttaatcgctattgttatggtcaccattatgctttgttgtatgacgtcctgttgttcttgtctaaagggctgctgttcgtgcggttcctgctgtaaattcgatgaggatgactccgaacccgttctgaaaggcgtcaagctccattatacttaatgaaagcttgtcgagaagtactagaggatcataatcagccataccacatttgtagaggttttacttgctttaaaaaacctcccacacctccccctgaacctgaaacataaaatgaatgcaattgttgttgttaacttgtttattgcagcttataatggttacaaataaagcaatagcatcacaaatttcacaaataaagcatttttttcactgcattctagttgtggtttgtccaaactcatcaatgtatcttatcatgtctggatctgatcactgcttgagcctaggtagctgagcgcatgcaagctgatccgggttattagtacatttattaagcgctagattctgtgcgttgttgatttacagacaattgttgtacgtattttaataattcattaaatttataatctttagggtggtatgttagagcgaaaatcaaatgattttcagcgtctttatatctgaatttaaatattaaatcctcaatagatttgtaaaataggtttcgattagtttcaaacaagggttgtttttccgaaccgatggctggactatctaatggattttcgctcaacgccacaaaacttgccaaatcttgtagcagcaatctagctttgtcgatattcgtttgtgttttgttttgtaataaaggttcgacgtcgttcaaaatattatgcgcttttgtatttctttcatcactgtcgttagtgtacaattgactcgacgtaaacacgttaaatagagcttggacatatttaacatcgggcgtgttagctttattaggccgattatcgtcgtcgtcccaaccctcgtcgttagaagttgcttccgaagacgattttgccatagccacacgacgcctattaattgtgtcggctaacacgtccgcgatcaaatttgtagttgagctttttggaattatttctgattgcgggcgtttttgggcgggtttcaatctaactgtgcccgattttaattcagacaacacgttagaaagcgatggtgcaggcggtggtaacatttcagacggcaaatctactaatggcggcggtggtggagctgatgataaatctaccatcggtggaggcgcaggcggggctggcggcggaggcggaggcggaggtggtggcggtgatgcagacggcggtttaggctcaaatgtctctttaggcaacacagtcggcacctcaactattgtactggtttcgggcgccgtttttggtttgaccggtctgagacgagtgcgatttttttcgtttctaatagcttccaacaattgttgtctgtcgtctaaaggtgcagcgggttgaggttccgtcggcattggtggagcgggcggcaattcagacatcgatggtggtggtggtggtggaggcgctggaatgttaggcacgggagaaggtggtggcggcggtgccgccggtataatttgttctggtttagtttgttcgcgcacgattgtgggcaccggcgcaggcgccgctggctgcacaacggaaggtcgtctgcttcgaggcagcgcttggggtggtggcaattcaatattataattggaatacaaatcgtaaaaatctgctataagcattgtaatttcgctatcgtttaccgtgccgatatttaacaaccgctcaatgtaagcaattgtattgtaaagagattgtctcaagctcggatcgatcccgcacgccgataacaagccttttcatttttactacagcattgtagtggcgagacacttcgctgtcgtcgaggtttaaacgcttcctcgctcactgactcgctgcgctcggtcgttcggctgcggcgagcggtatcagctcactcaaaggcggtaatacggttatccacagaatcaggggataacgcaggaaagaacatgtgagcaaaaggccagcaaaaggccaggaaccgtaaaaaggccgcgttgctggcgtttttccataggctccgcccccctgacgagcatcacaaaaatcgacgctcaagtcagaggtggcgaaacccgacaggactataaagataccaggcgtttccccctggaagctccctcgtgcgctctcctgttccgaccctgccgcttaccggatacctgtccgcctttctcccttcgggaagcgtggcgctttctcatagctcacgctgtaggtatctcagttcggtgtaggtcgttcgctccaagctgggctgtgtgcacgaaccccccgttcagcccgaccgctgcgccttatccggtaactatcgtcttgagtccaacccggtaagacacgacttatcgccactggcagcagccactggtaacaggattagcagagcgaggtatgtaggcggtgctacagagttcttgaagtggtggcctaactacggctacactagaaggacagtatttggtatctgcgctctgctgaagccagttaccttcggaaaaagagttggtagctcttgatccggcaaacaaaccaccgctggtagcggtggtttttttgtttgcaagcagcagattacgcgcagaaaaaaaggatctcaagaagatcctttgatcttttctacggggtctgacgctcagtggaacgaaaactcacgttaagggattttggtcatgagattatcaaaaaggatcttcacctagatccttttaaattaaaaatgaagttttaaatcaatctaaagtatatatgagtaaacttggtctgacagttaccaatgcttaatcagtgaggcacctatctcagcgatctgtctatttcgttcatccatagttgcctgactccccgtcgtgtagataactacgatacgggagggcttaccatctggccccagtgctgcaatgataccgcgagacccacgctcaccggctccagatttatcagcaataaaccagccagccggaagggccgagcgcagaagtggtcctgcaactttatccgcctccatccagtctattaattgttgccgggaagctagagtaagtagttcgccagttaatagtttgcgcaacgttgttgccattgctacaggcatcgtggtgtcacgctcgtcgtttggtatggcttcattcagctccggttcccaacgatcaaggcgagttacatgatcccccatgttgtgcaaaaaagcggttagctccttcggtcctccgatcgttgtcagaagtaagttggccgcagtgttatcactcatggttatggcagcactgcataattctcttactgtcatgccatccgtaagatgcttttctgtgactggtgagtactcaaccaagtcattctgagaatagtgtatgcggcgaccgagttgctcttgcccggcgtcaatacgggataataccgcgccacatagcagaactttaaaagtgctcatcattggaaaacgttcttcggggcgaaaactctcaaggatcttaccgctgttgagatccagttcgatgtaacccactcgtgcacccaactgatcttcagcatcttttactttcaccagcgtttctgggtgagcaaaaacaggaaggcaaaatgccgcaaaaaagggaataagggcgacacggaaatgttgaatactcatactcttcctttttcaatattattgaagcatttatcagggttattgtctcatgagcggatacatatttgaatgtatttagaaaaataaacaaataggggttccgcgcacatttccccgaaaagtgccacctgacgcgccctgtagcggcgcattaagcgcggcgggtgtggtggttacgcgcagcgtgaccgctacacttgccagcgccctagcgcccgctcctttcgctttcttcccttcctttctcgccacgttcgccggctttccccgtcaagctctaaatcgggggctccctttagggttccgatttagtgctttacggcacctcgaccccaaaaaacttgattagggtgatggttcacgtagtgggccatcgccctgatagacggtttttcgccctttgacgttggagtccacgttctttaatagtggactcttgttccaaactggaacaacactcaaccctatctcggtctattcttttgatttataagggattttgccgatttcggcctattggttaaaaaatgagctgatttaacaaaaatttaacgcgaattttaacaaaatattaacgtttacaatttcccattcgccattcaggctgcgcaactgttgggaagggcgatcggtgcgggcctcttcgctattacgcca

SEQ ID NO: 164 - DNA, 9299 bp, synthetic construct
  misc_feature 1..9299: note = encodes recombinant coronavirus Spike (S) polypeptide
  source 1..9299: mol_type = other DNA
ggaacggctccgcccactattaatgaaattaaaaattccaattttaaaaaacgcagcaagagaaacatttgtatgaaagaatgcgtagaaggaaagaaaaatgtcgtcgacatgctgaacaacaagattaatatgcctccgtgtataaaaaaaatattgaacgatttgaaagaaaacaatgtaccgcgcggcggtatgtacaggaagaggtttatactaaactgttacattgcaaacgtggtttcgtgtgccaagtgtgaaaaccgatgtttaatcaaggctctgacgcatttctacaaccacgactccaagtgtgtgggtgaagtcatgcatcttttaatcaaatcccaagatgtgtataaaccaccaaactgccaaaaaatgaaaactgtcgacaagctctgtccgtttgctggcaactgcaagggtctcaatcctatttgtaattattgaataataaaacaattataaatgctaaatttgttttttattaacgatacaaaccaaacgcaacaagaacatttgtagtattatctataattgaaaacgcgtagttataatcgctgaggtaatatttaaaatcattttcaaatgattcacagttaatttgcgacaatataattttattttcacataaactagacgccttgtcgtcttcttcttcgtattccttctctttttcatttttctcttcataaaaattaacatagttattatcgtatccatatatgtatctatcgtatagagtaaattttttgttgtcataaatatatatgtcttttttaatggggtgtatagtaccgctgcgcatagtttttctgtaatttacaacagtgctattttctggtagttcttcggagtgtgttgctttaattattaaatttatataatcaatgaatttgggatcgtcggttttgtacaatatgttgccggcatagtacgcagcttcttctagttcaattacaccattttttagcagcaccggattaacataactttccaaaatgttgtacgaaccgttaaacaaaaacagttcacctcccttttctatactattgtctgcgagcagttgtttgttgttaaaaataacagccattgtaatgagacgcacaaactaatatcacaaactggaaatgtctatcaatatatagttgctgatcagatctgatcatggagataattaaaatgataaccatctcgcaaataaataagtattttactgttttcgtaacagttttgtaataaaaaaacctataaatataggatccgccaccatgtttgtttttctcgtactacttccactagtatctagccaatgtgtaaatttaaccacgaggacgcagctgcctccggcatatacgaatagtttcactaggggagtctattatccagataaagtgttccgaagcagtgttctacattcaacacaggacctcttccttcctttctttagcaacgtcacgtggttccatgtcataagcggcacaaacggcacaaagcgcttcgataatccggtgcttccgtttaacgatggggtttattttgcttctattgaaaagagcaacattatacgcggttggatcttcggaactacattggatagtaaaacgcaatcattgctaatcgttaataacgcgactaatgtagtgattaaggtgtgcgagttccagttttgcaatgacccctttttggatcataaaaataataaatcgtggatggaatcagaatttcgtgtatattcaagcgcaaacaactgtacgttcgagtacgtgagtcagcccttcttgatggatctggaagggaagcagggcaattttaaaaacttacgtgagtttgtatttaagaatatcgacgggtatttcaagatttactcaaagcacacaccgattattgttcgagagccggaagatttaccccaaggcttctcagcactggaacccttggtagacctacctatcggtattaatataacccgcttccaaaccttgttagcgctgcatcggagttatttaacccccggagactcatcgagcgggtggaccgccggggctgcagcttattacgtggggtatttacaaccacggacgttcttactcaagtacaacgagaacgggacgattactgatgccgtcgactgtgctttggacccgctgagcgaaaccaagtgcacactcaagtctttcacggtagagaaggggatctaccagacatcaaattttcgggtacaaccaacggagtccatcgtacgctttccgaatatcacgaatctttgtccattcgatgaggtattcaatgctacgcgttttgcgagtgtgtacgcgtggaataggaagcgtatctcaaattgcgtcgctgattactccgtactctataacagcgcgcccttctttaccttcaaatgctacggggtttctcctactaaactaaacgatctatgttttacgaacgtctacgcagacagctttgttatacgaggggacgaggttcggcagatcgcccccggccaaacaggaaacatcgccgactataattacaaactcccagatgactttactggttgcgtaattgcgtggaactctaacaagttagactccaaggtctcgggaaactacaattacctgtaccgtctcttcagaaaatctaacttaaagcctttcgagcgagatattagcactgaaatctatcaggcgggtaataaaccctgtaacggggtcgccggttttaactgctactttcctcttcggtcgtattcctttcgcccgacctatggagttggacaccaaccttatagagtcgttgttctaagttttgaattgctccatgccccggcgacggtatgcgggccaaagaaaagtactaatctcgttaagaataaatgtgtgaatttcaactttaacggacttaaaggtacgggcgtattgaccgagtcaaataaaaagtttttacccttccagcaatttggtagggatatcgcggatactactgacgcagtgagagatccacaaacacttgaaatcctagacatcaccccttgtagttttgggggagtgtctgtaatcacccctggtacaaacacttctaaccaagtcgcggttctttatcagggtgttaattgtacagaagtgcctgtcgccattcatgcagaccagctgacgcccacttggcgcgtctactcgacgggatctaatgtctttcagactcgagctggatgcctcatcggggcagaatacgtgaacaactcctatgaatgcgatattcctatcggtgctggcatttgcgcatcttatcaaacacagaccaaaagtcatcagcaagcgcaatccgttgccagtcaatctataattgcgtatacaatgtccttgggcgcggaaaattcagtcgcgtatagcaacaattctatcgctattccaacgaattttactatatcggtcacaacagagatactaccagtgtcgatgactaagacttcggtagattgcacaatgtacatatgcggagacagcacagaatgctcgaacctacttcttcaatatggttctttttgcactcagctcaagagagctcttactggcatagcagtggagcaagataaaaatacccaggaagtgtttgctcaagtaaaacagatatataaaacccctccgatcaaatattttggaggttttaacttctcacaaatactaccggacccttccaaaccatcgaaacggtccttcatagaggacttgctctttaataaggtaactttggcggatgctggttttataaagcagtatggagattgtcttggtgacatagcggccagagacctcatctgtgcacagaaattcaaaggtctaacagtacttccgcccctgctaacggacgagatgatagctcaatacaccagtgcccttctggctggaacgataaccagtggatggaccttcggcgcaggtgccgcactgcagattccgttcgcaatgcagatggcctatcggtttaatgggatcggcgtcactcaaaatgtattgtacgaaaatcagaaactcattgccaaccaattcaattcagcgataggcaagatccaggacagtctctcttccaccgcctccgccttaggtaagctacaagatgttgttaatcataacgctcaagcattgaatacgctggtaaaacaattgagcagcaaattcggcgcaattagctcagttttgaacgacatattctcccgacttgacccccccgaagctgaagtccaaatagataggctgataaccgggaggctacagtcactccaaacctacgtgactcaacagctcataagagcagccgaaataagagcctctgctaatctcgccgcgactaagatgtcagagtgtgttttaggtcaaagtaaaagggttgatttctgtggtaagggataccaccttatgtcctttccacaatcggctccacacggtgtggtctttctgcacgttacttatgtcccggctcaggagaagaatttcaccacagccccggctatttgtcatgacggcaaggcgcacttccccagagaaggcgtattcgtcagtaacggcactcactggttcgttactcaacgtaacttctacgaacctcagattataacgacagacaacacatttgtatcagggaactgtgatgtggtgatcggtatagtgaacaacacagtgtacgacccattacagccggagttagattctttcaaggaagagctggataagtacttcaagaatcacacctcgccagatgttgaccttggtgatatttcaggtataaacgcctctgtcgtgaatatccagaaagagatcgaccgtctcaacgaagtagcgaaaaatctaaacgaatcgttaattgaccttcaggagctggggaagtatgagcagtacattaagtggccctggtacatttggctgggctttattgcaggactgatagcaatagtgatggtcaccattatgttgtgctgcatgacatcctgctgctcttgtttaaaagggtgttgtagttgtggatcgtgttgcaagttcgacgaggatgattccgaacctgttctgaaaggcgtaaaattacactacacataatgaaagcttgtcgagaagtactagaggatcataatcagccataccacatttgtagaggttttacttgctttaaaaaacctcccacacctccccctgaacctgaaacataaaatgaatgcaattgttgttgttaacttgtttattgcagcttataatggttacaaataaagcaatagcatcacaaatttcacaaataaagcatttttttcactgcattctagttgtggtttgtccaaactcatcaatgtatcttatcatgtctggatctgatcactgcttgagcctaggtagctgagcgcatgcaagctgatccgggttattagtacatttattaagcgctagattctgtgcgttgttgatttacagacaattgttgtacgtattttaataattcattaaatttataatctttagggtggtatgttagagcgaaaatcaaatgattttcagcgtctttatatctgaatttaaatattaaatcctcaatagatttgtaaaataggtttcgattagtttcaaacaagggttgtttttccgaaccgatggctggactatctaatggattttcgctcaacgccacaaaacttgccaaatcttgtagcagcaatctagctttgtcgatattcgtttgtgttttgttttgtaataaaggttcgacgtcgttcaaaatattatgcgcttttgtatttctttcatcactgtcgttagtgtacaattgactcgacgtaaacacgttaaatagagcttggacatatttaacatcgggcgtgttagctttattaggccgattatcgtcgtcgtcccaaccctcgtcgttagaagttgcttccgaagacgattttgccatagccacacgacgcctattaattgtgtcggctaacacgtccgcgatcaaatttgtagttgagctttttggaattatttctgattgcgggcgtttttgggcgggtttcaatctaactgtgcccgattttaattcagacaacacgttagaaagcgatggtgcaggcggtggtaacatttcagacggcaaatctactaatggcggcggtggtggagctgatgataaatctaccatcggtggaggcgcaggcggggctggcggcggaggcggaggcggaggtggtggcggtgatgcagacggcggtttaggctcaaatgtctctttaggcaacacagtcggcacctcaactattgtactggtttcgggcgccgtttttggtttgaccggtctgagacgagtgcgatttttttcgtttctaatagcttccaacaattgttgtctgtcgtctaaaggtgcagcgggttgaggttccgtcggcattggtggagcgggcggcaattcagacatcgatggtggtggtggtggtggaggcgctggaatgttaggcacgggagaaggtggtggcggcggtgccgccggtataatttgttctggtttagtttgttcgcgcacgattgtgggcaccggcgcaggcgccgctggctgcacaacggaaggtcgtctgcttcgaggcagcgcttggggtggtggcaattcaatattataattggaatacaaatcgtaaaaatctgctataagcattgtaatttcgctatcgtttaccgtgccgatatttaacaaccgctcaatgtaagcaattgtattgtaaagagattgtctcaagctcggatcgatcccgcacgccgataacaagccttttcatttttactacagcattgtagtggcgagacacttcgctgtcgtcgaggtttaaacgcttcctcgctcactgactcgctgcgctcggtcgttcggctgcggcgagcggtatcagctcactcaaaggcggtaatacggttatccacagaatcaggggataacgcaggaaagaacatgtgagcaaaaggccagcaaaaggccaggaaccgtaaaaaggccgcgttgctggcgtttttccataggctccgcccccctgacgagcatcacaaaaatcgacgctcaagtcagaggtggcgaaacccgacaggactataaagataccaggcgtttccccctggaagctccctcgtgcgctctcctgttccgaccctgccgcttaccggatacctgtccgcctttctcccttcgggaagcgtggcgctttctcatagctcacgctgtaggtatctcagttcggtgtaggtcgttcgctccaagctgggctgtgtgcacgaaccccccgttcagcccgaccgctgcgccttatccggtaactatcgtcttgagtccaacccggtaagacacgacttatcgccactggcagcagccactggtaacaggattagcagagcgaggtatgtaggcggtgctacagagttcttgaagtggtggcctaactacggctacactagaaggacagtatttggtatctgcgctctgctgaagccagttaccttcggaaaaagagttggtagctcttgatccggcaaacaaaccaccgctggtagcggtggtttttttgtttgcaagcagcagattacgcgcagaaaaaaaggatctcaagaagatcctttgatcttttctacggggtctgacgctcagtggaacgaaaactcacgttaagggattttggtcatgagattatcaaaaaggatcttcacctagatccttttaaattaaaaatgaagttttaaatcaatctaaagtatatatgagtaaacttggtctgacagttaccaatgcttaatcagtgaggcacctatctcagcgatctgtctatttcgttcatccatagttgcctgactccccgtcgtgtagataactacgatacgggagggcttaccatctggccccagtgctgcaatgataccgcgagacccacgctcaccggctccagatttatcagcaataaaccagccagccggaagggccgagcgcagaagtggtcctgcaactttatccgcctccatccagtctattaattgttgccgggaagctagagtaagtagttcgccagttaatagtttgcgcaacgttgttgccattgctacaggcatcgtggtgtcacgctcgtcgtttggtatggcttcattcagctccggttcccaacgatcaaggcgagttacatgatcccccatgttgtgcaaaaaagcggttagctccttcggtcctccgatcgttgtcagaagtaagttggccgcagtgttatcactcatggttatggcagcactgcataattctcttactgtcatgccatccgtaagatgcttttctgtgactggtgagtactcaaccaagtcattctgagaatagtgtatgcggcgaccgagttgctcttgcccggcgtcaatacgggataataccgcgccacatagcagaactttaaaagtgctcatcattggaaaacgttcttcggggcgaaaactctcaaggatcttaccgctgttgagatccagttcgatgtaacccactcgtgcacccaactgatcttcagcatcttttactttcaccagcgtttctgggtgagcaaaaacaggaaggcaaaatgccgcaaaaaagggaataagggcgacacggaaatgttgaatactcatactcttcctttttcaatattattgaagcatttatcagggttattgtctcatgagcggatacatatttgaatgtatttagaaaaataaacaaataggggttccgcgcacatttccccgaaaagtgccacctgacgcgccctgtagcggcgcattaagcgcggcgggtgtggtggttacgcgcagcgtgaccgctacacttgccagcgccctagcgcccgctcctttcgctttcttcccttcctttctcgccacgttcgccggctttccccgtcaagctctaaatcgggggctccctttagggttccgatttagtgctttacggcacctcgaccccaaaaaacttgattagggtgatggttcacgtagtgggccatcgccctgatagacggtttttcgccctttgacgttggagtccacgttctttaatagtggactcttgttccaaactggaacaacactcaaccctatctcggtctattcttttgatttataagggattttgccgatttcggcctattggttaaaaaatgagctgatttaacaaaaatttaacgcgaattttaacaaaatattaacgtttacaatttcccattcgccattcaggctgcgcaactgttgggaagggcgatcggtgcgggcctcttcgctattacgcca

SEQ ID NO: 165 - DNA, 3843 bp, synthetic construct
  misc_feature 1..3843: note = encodes recombinant coronavirus Spike (S) polypeptide
  source 1..3843: mol_type = other DNA
ggatccgccaccatgtttgtattcttagtattgctgcccctagtgagcagccagtgtgttaatctgacgacgcggacccaacttcctccagcctacacaaactcttttacgcgcggggtctattacccggacaaagtgttccgttcgagtgttttgcatagcacccaggatttattcctaccattcttttcaaatgttacctggttccatgtgattcacgtctccggtactaatggaactaaacggttcgacaaccccgttttgccgttcaacgatggggtgtacttcgcttctattgagaagtcgaatatcatacgtgggtggattttcggcacgaccttggatagtaaaactcagtcgttacttatagtaaataatgctaccaatgttgtgattaaggtgtgtgagttccagttttgtaatgatccctttcttgacgtctattatcataaaaataacaaatcatggatggaatcggagtttcgggtgtattcctctgcgaacaactgtacatttgaatatgtgtctcagccgttcctgatggatttggagggtaagcaaggcaactttaagaatttgcgagagttcgtcttcaagaacatagatggatactttaaaatttatagcaagcacacaccgattaatatagtgcgagaccttcctcaaggtttctcggcccttgagccgctagtggacctgcccattggaattaatatcacccggtttcagactctgcttgcccttcatcgttcttatctgacccctggcgattcttcatcaggatggacggctggggctgccgcctattatgtcggataccttcaaccaaggacttttctcctcaagtataacgagaacggaacaattacagatgcagtcgattgcgccctagaccctctgtcggaaacgaagtgcaccttgaagagttttacagtagagaaggggatttaccagaccagtaacttcagggtccaaccgaccgaatccatcgtccgatttccaaatataactaatttatgtccgtttgacgaggtcttcaacgcaactcggttcgcgtcagtttatgcgtggaaccgcaaaagaataagcaactgcgtagctgactattccgttctctacaactctgcgccgttttttacttttaaatgctatggagtaagtccaacaaaattaaatgatctatgttttacaaatgtgtacgcagactcgtttgtaataaggggtgacgaagttcgtcagatagcaccagggcaaactgggaatattgcagactacaactataagctacccgatgacttcactggctgcgtcatcgcttggaatagtaataaattagatagtaaggtgagtgggaattataattacctatatcgtctctttagaaaaagtaacctcaagccattcgaacgcgacatttctacagaaatctatcaagctggcaataaaccttgcaacggtgtcgcgggcttcaactgctactttccccttaggtcgtactcttttcgacctacctatggtgtgggccaccagccctatagagttgttgtcctatcttttgaactattacatgccccagcgacggtatgcggacccaagaagtcgactaatttagtaaagaacaaatgcgttaattttaattttaatggccttaaagggacaggtgttttaacggaatcgaataaaaaattcttacctttccagcaatttggacgcgacatagctgatacgacggatgcagtcagagaccctcagacactggagatactggacataaccccgtgcagcttcgggggagtctccgtaataacccctgggacgaacacatccaatcaggtagcagtattatatcaaggcgtcaattgtacagaagttcctgtcgctatccatgcagatcaactcaccccgacctggcgcgtttatagcactgggagtaatgtattccaaactcgtgcaggatgtcttatcggggctgaatacgtgaataactcatacgagtgtgacattccaattggagctggcatatgtgccagctatcaaactcaaacgaagtcccaccaacaggcacagtctgtcgcgtctcaatcgatcattgcctatacaatgagtcttggtgccgaaaattcagttgcatatagcaacaactcaatagcgatacctactaatttcacaatcagtgtgaccaccgaaattctcccagtatcgatgacaaagacatccgtggattgtactatgtacatctgtggagactcgacggagtgctccaacttactccttcagtacgggtccttttgcactcaattaaagagggccctaacaggcattgctgttgagcaagacaagaacacgcaagaggtatttgcacaggtgaagcaaatatacaagacaccaccaattaagtactttggaggttttaacttctctcagatactcccagatcccagcaaaccctctaaacggagcttcatagaagacctcttgtttaataaagtgactttagctgatgcaggctttatcaagcaatatggggattgtttgggggatattgccgcccgcgacctcatctgcgcccagaaattcaagggtctaacagtattaccaccgctcctgacagacgagatgatcgctcaatacacttctgcgctgttggccgggacaattacgtctgggtggaccttcggcgcaggtgccgccttgcagatcccatttgcgatgcaaatggcgtatcgttttaacggtataggtgtcacacaaaacgtattatacgaaaaccagaaactaatagctaaccaatttaactcagcaataggaaaaatacaggattctctttcctctacggcgagcgccctcgggaaacttcaggatgtagtgaaccataacgctcaagcacttaataccctggttaagcaactatcaagcaagttcggtgctatctcatcagtgcttaatgacatcttcagtcgactagatcccccggaagcagaagttcaaatcgacagattgataactggccgcttgcaatctctacaaacatacgttacccagcagctgattcgggctgcggaaatccgagcatcggccaacctcgccgcgactaaaatgagcgagtgcgtattgggccagagtaaaagggttgacttctgcggtaagggctaccaccttatgagttttccgcagagtgcgcctcacggagttgtcttcctccacgtgacgtatgtgccggcacaggaaaaaaatttcaccaccgcccctgcgatatgtcatgatggtaaggcgcactttccaagagagggtgtctttgtttcaaatggaacccactggttcgttactcaacgtaatttttacgaacctcagattatcactacggataatacgttcgtgtcaggaaactgcgacgtggtaattggtatagtaaataatactgtgtatgatcccctccagccggagctggactcattcaaagaggaattagataagtacttcaaaaatcacacaagccctgatgtggacttgggagatatctcaggaattaacgcttccgttgtcaacatccaaaaagagatagacaggctgaatgaagtagcgaaaaacctgaacgaatccctgattgacttgcaagagctgggcaaatacgaacagtatattaaatggccctggtatatttggttggggttcatcgctggtttaatcgctattgttatggtcaccattatgctttgttgtatgacgtcctgttgttcttgtctaaagggctgctgttcgtgcggttcctgctgtaaattcgatgaggatgactccgaacccgttctgaaaggcgtcaagctccattatacttaatgaaagctt

SEQ ID NO: 166 - DNA, 3834 bp, synthetic construct
  misc_feature 1..3834: note = encodes recombinant coronavirus Spike (S) polypeptide
  source 1..3834: mol_type = other DNA
ggatccgccaccatgtttgtttttctcgtactacttccactagtatctagccaatgtgtaaatttaaccacgaggacgcagctgcctccggcatatacgaatagtttcactaggggagtctattatccagataaagtgttccgaagcagtgttctacattcaacacaggacctcttccttcctttctttagcaacgtcacgtggttccatgtcataagcggcacaaacggcacaaagcgcttcgataatccggtgcttccgtttaacgatggggtttattttgcttctattgaaaagagcaacattatacgcggttggatcttcggaactacattggatagtaaaacgcaatcattgctaatcgttaataacgcgactaatgtagtgattaaggtgtgcgagttccagttttgcaatgacccctttttggatcataaaaataataaatcgtggatggaatcagaatttcgtgtatattcaagcgcaaacaactgtacgttcgagtacgtgagtcagcccttcttgatggatctggaagggaagcagggcaattttaaaaacttacgtgagtttgtatttaagaatatcgacgggtatttcaagatttactcaaagcacacaccgattattgttcgagagccggaagatttaccccaaggcttctcagcactggaacccttggtagacctacctatcggtattaatataacccgcttccaaaccttgttagcgctgcatcggagttatttaacccccggagactcatcgagcgggtggaccgccggggctgcagcttattacgtggggtatttacaaccacggacgttcttactcaagtacaacgagaacgggacgattactgatgccgtcgactgtgctttggacccgctgagcgaaaccaagtgcacactcaagtctttcacggtagagaaggggatctaccagacatcaaattttcgggtacaaccaacggagtccatcgtacgctttccgaatatcacgaatctttgtccattcgatgaggtattcaatgctacgcgttttgcgagtgtgtacgcgtggaataggaagcgtatctcaaattgcgtcgctgattactccgtactctataacagcgcgcccttctttaccttcaaatgctacggggtttctcctactaaactaaacgatctatgttttacgaacgtctacgcagacagctttgttatacgaggggacgaggttcggcagatcgcccccggccaaacaggaaacatcgccgactataattacaaactcccagatgactttactggttgcgtaattgcgtggaactctaacaagttagactccaaggtctcgggaaactacaattacctgtaccgtctcttcagaaaatctaacttaaagcctttcgagcgagatattagcactgaaatctatcaggcgggtaataaaccctgtaacggggtcgccggttttaactgctactttcctcttcggtcgtattcctttcgcccgacctatggagttggacaccaaccttatagagtcgttgttctaagttttgaattgctccatgccccggcgacggtatgcgggccaaagaaaagtactaatctcgttaagaataaatgtgtgaatttcaactttaacggacttaaaggtacgggcgtattgaccgagtcaaataaaaagtttttacccttccagcaatttggtagggatatcgcggatactactgacgcagtgagagatccacaaacacttgaaatcctagacatcaccccttgtagttttgggggagtgtctgtaatcacccctggtacaaacacttctaaccaagtcgcggttctttatcagggtgttaattgtacagaagtgcctgtcgccattcatgcagaccagctgacgcccacttggcgcgtctactcgacgggatctaatgtctttcagactcgagctggatgcctcatcggggcagaatacgtgaacaactcctatgaatgcgatattcctatcggtgctggcatttgcgcatcttatcaaacacagaccaaaagtcatcagcaagcgcaatccgttgccagtcaatctataattgcgtatacaatgtccttgggcgcggaaaattcagtcgcgtatagcaacaattctatcgctattccaacgaattttactatatcggtcacaacagagatactaccagtgtcgatgactaagacttcggtagattgcacaatgtacatatgcggagacagcacagaatgctcgaacctacttcttcaatatggttctttttgcactcagctcaagagagctcttactggcatagcagtggagcaagataaaaatacccaggaagtgtttgctcaagtaaaacagatatataaaacccctccgatcaaatattttggaggttttaacttctcacaaatactaccggacccttccaaaccatcgaaacggtccttcatagaggacttgctctttaataaggtaactttggcggatgctggttttataaagcagtatggagattgtcttggtgacatagcggccagagacctcatctgtgcacagaaattcaaaggtctaacagtacttccgcccctgctaacggacgagatgatagctcaatacaccagtgcccttctggctggaacgataaccagtggatggaccttcggcgcaggtgccgcactgcagattccgttcgcaatgcagatggcctatcggtttaatgggatcggcgtcactcaaaatgtattgtacgaaaatcagaaactcattgccaaccaattcaattcagcgataggcaagatccaggacagtctctcttccaccgcctccgccttaggtaagctacaagatgttgttaatcataacgctcaagcattgaatacgctggtaaaacaattgagcagcaaattcggcgcaattagctcagttttgaacgacatattctcccgacttgacccccccgaagctgaagtccaaatagataggctgataaccgggaggctacagtcactccaaacctacgtgactcaacagctcataagagcagccgaaataagagcctctgctaatctcgccgcgactaagatgtcagagtgtgttttaggtcaaagtaaaagggttgatttctgtggtaagggataccaccttatgtcctttccacaatcggctccacacggtgtggtctttctgcacgttacttatgtcccggctcaggagaagaatttcaccacagccccggctatttgtcatgacggcaaggcgcacttccccagagaaggcgtattcgtcagtaacggcactcactggttcgttactcaacgtaacttctacgaacctcagattataacgacagacaacacatttgtatcagggaactgtgatgtggtgatcggtatagtgaacaacacagtgtacgacccattacagccggagttagattctttcaaggaagagctggataagtacttcaagaatcacacctcgccagatgttgaccttggtgatatttcaggtataaacgcctctgtcgtgaatatccagaaagagatcgaccgtctcaacgaagtagcgaaaaatctaaacgaatcgttaattgaccttcaggagctggggaagtatgagcagtacattaagtggccctggtacatttggctgggctttattgcaggactgatagcaatagtgatggtcaccattatgttgtgctgcatgacatcctgctgctcttgtttaaaagggtgttgtagttgtggatcgtgttgcaagttcgacgaggatgattccgaacctgttctgaaaggcgtaaaattacactacacataatgaaagctt

SEQ ID NO: 167 - protein, 1273 aa, synthetic construct
  REGION 1..1273: note = recombinant coronavirus Spike (S) polypeptide
MFVFLVLLPLVSSQCVNLTTRTQLPPAYTNSFTRGVYYPDKVFRSSVLHSTQDLFLPFFSNVTWFHVIHVSGTNGTKRFDNPVLPFNDGVYFASIEKSNIIRGWIFGTTLDSKTQSLLIVNNATNVVIKVCEFQFCNDPFLDVYYHKNNKSWMESEFRVYSSANNCTFEYVSQPFLMDLEGKQGNFKNLREFVFKNIDGYFKIYSKHTPINIVRDLPQGFSALEPLVDLPIGINITRFQTLLALHRSYLTPGDSSSGWTAGAAAYYVGYLQPRTFLLKYNENGTITDAVDCALDPLSETKCTLKSFTVEKGIYQTSNFRVQPTESIVRFPNITNLCPFDEVFNATRFASVYAWNRKRISNCVADYSVLYNSAPFFTFKCYGVSPTKLNDLCFTNVYADSFVIRGDEVRQIAPGQTGNIADYNYKLPDDFTGCVIAWNSNKLDSKVSGNYNYLYRLFRKSNLKPFERDISTEIYQAGNKPCNGVAGFNCYFPLRSYSFRPTYGVGHQPYRVVVLSFELLHAPATVCGPKKSTNLVKNKCVNFNFNGLKGTGVLTESNKKFLPFQQFGRDIADTTDAVRDPQTLEILDITPCSFGGVSVITPGTNTSNQVAVLYQGVNCTEVPVAIHADQLTPTWRVYSTGSNVFQTRAGCLIGAEYVNNSYECDIPIGAGICASYQTQTKSHQQAQSVASQSIIAYTMSLGAENSVAYSNNSIAIPTNFTISVTTEILPVSMTKTSVDCTMYICGDSTECSNLLLQYGSFCTQLKRALTGIAVEQDKNTQEVFAQVKQIYKTPPIKYFGGFNFSQILPDPSKPSKRSFIEDLLFNKVTLADAGFIKQYGDCLGDIAARDLICAQKFKGLTVLPPLLTDEMIAQYTSALLAGTITSGWTFGAGAALQIPFAMQMAYRFNGIGVTQNVLYENQKLIANQFNSAIGKIQDSLSSTASALGKLQDVVNHNAQALNTLVKQLSSKFGAISSVLNDIFSRLDPPEAEVQIDRLITGRLQSLQTYVTQQLIRAAEIRASANLAATKMSECVLGQSKRVDFCGKGYHLMSFPQSAPHGVVFLHVTYVPAQEKNFTTAPAICHDGKAHFPREGVFVSNGTHWFVTQRNFYEPQIITTDNTFVSGNCDVVIGIVNNTVYDPLQPELDSFKEELDKYFKNHTSPDVDLGDISGINASVVNIQKEIDRLNEVAKNLNESLIDLQELGKYEQYIKWPWYIWLGFIAGLIAIVMVTIMLCCMTSCCSCLKGCCSCGSCCKFDEDDSEPVLKGVKLHYT

SEQ ID NO: 168 - DNA, 3843 bp, synthetic construct
  misc_feature 1..3843: note = encodes recombinant coronavirus Spike (S) polypeptide
  source 1..3843: mol_type = other DNA
ggatccgccaccatgtttgtattcttagtattgctgcccctagtgagcagccagtgtgttaatctgacgacgcggacccaacttcctccagcctacacaaactcttttacgcgcggggtctattacccggacaaagtgttccgttcgagtgttttgcatagcacccaggatttattcctaccattcttttcaaatgttacctggttccatgtgattcacgtctccggtactaatggaactaaacggttcgacaaccccgttttgccgttcaacgatggggtgtacttcgcttctattgagaagtcgaatatcatacgtgggtggattttcggcacgaccttggatagtaaaactcagtcgttacttatagtaaataatgctaccaatgttgtgattaaggtgtgtgagttccagttttgtaatgatccctttcttgacgtctattatcataaaaataacaaatcatggatggaatcggagtttcgggtgtattcctctgcgaacaactgtacatttgaatatgtgtctcagccgttcctgatggatttggagggtaagcaaggcaactttaagaatttgcgagagttcgtcttcaagaacatagatggatactttaaaatttatagcaagcacacaccgattaatatagtgcgagaccttcctcaaggtttctcggcccttgagccgctagtggacctgcccattggaattaatatcacccggtttcagactctgcttgcccttcatcgttcttatctgacccctggcgattcttcatcaggatggacggctggggctgccgcctattatgtcggataccttcaaccaaggacttttctcctcaagtataacgagaacggaacaattacagatgcagtcgattgcgccctagaccctctgtcggaaacgaagtgcaccttgaagagttttacagtagagaaggggatttaccagaccagtaacttcagggtccaaccgaccgaatccatcgtccgatttccaaatataactaatttatgtccgtttgacgaggtcttcaacgcaactcggttcgcgtcagtttatgcgtggaaccgcaaaagaataagcaactgcgtagctgactattccgttctctacaactctgcgccgttttttacttttaaatgctatggagtaagtccaacaaaattaaatgatctatgttttacaaatgtgtacgcagactcgtttgtaataaggggtgacgaagttcgtcagatagcaccagggcaaactgggaatattgcagactacaactataagctacccgatgacttcactggctgcgtcatcgcttggaatagtaataaattagatagtaaggtgagtgggaattataattacctatatcgtctctttagaaaaagtaacctcaagccattcgaacgcgacatttctacagaaatctatcaagctggcaataaaccttgcaacggtgtcgcgggcttcaactgctactttccccttaggtcgtactcttttcgacctacctatggtgtgggccaccagccctatagagttgttgtcctatcttttgaactattacatgccccagcgacggtatgcggacccaagaagtcgactaatttagtaaagaacaaatgcgttaattttaattttaatggccttaaagggacaggtgttttaacggaatcgaataaaaaattcttacctttccagcaatttggacgcgacatagctgatacgacggatgcagtcagagaccctcagacactggagatactggacataaccccgtgcagcttcgggggagtctccgtaataacccctgggacgaacacatccaatcaggtagcagtattatatcaaggcgtcaattgtacagaagttcctgtcgctatccatgcagatcaactcaccccgacctggcgcgtttatagcactgggagtaatgtattccaaactcgtgcaggatgtcttatcggggctgaatacgtgaataactcatacgagtgtgacattccaattggagctggcatatgtgccagctatcaaactcaaacgaagtcccaccaacaggcacagtctgtcgcgtctcaatcgatcattgcctatacaatgagtcttggtgccgaaaattcagttgcatatagcaacaactcaatagcgatacctactaatttcacaatcagtgtgaccaccgaaattctcccagtatcgatgacaaagacatccgtggattgtactatgtacatctgtggagactcgacggagtgctccaacttactccttcagtacgggtccttttgcactcaattaaagagggccctaacaggcattgctgttgagcaagacaagaacacgcaagaggtatttgcacaggtgaagcaaatatacaagacaccaccaattaagtactttggaggttttaacttctctcagatactcccagatcccagcaaaccctctaaacggagcttcatagaagacctcttgtttaataaagtgactttagctgatgcaggctttatcaagcaatatggggattgtttgggggatattgccgcccgcgacctcatctgcgcccagaaattcaagggtctaacagtattaccaccgctcctgacagacgagatgatcgctcaatacacttctgcgctgttggccgggacaattacgtctgggtggaccttcggcgcaggtgccgccttgcagatcccatttgcgatgcaaatggcgtatcgttttaacggtataggtgtcacacaaaacgtattatacgaaaaccagaaactaatagctaaccaatttaactcagcaataggaaaaatacaggattctctttcctctacggcgagcgccctcgggaaacttcaggatgtagtgaaccataacgctcaagcacttaataccctggttaagcaactatcaagcaagttcggtgctatctcatcagtgcttaatgacatcttcagtcgactagatcccccggaagcagaagttcaaatcgacagattgataactggccgcttgcaatctctacaaacatacgttacccagcagctgattcgggctgcggaaatccgagcatcggccaacctcgccgcgactaaaatgagcgagtgcgtattgggccagagtaaaagggttgacttctgcggtaagggctaccaccttatgagttttccgcagagtgcgcctcacggagttgtcttcctccacgtgacgtatgtgccggcacaggaaaaaaatttcaccaccgcccctgcgatatgtcatgatggtaaggcgcactttccaagagagggtgtctttgtttcaaatggaacccactggttcgttactcaacgtaatttttacgaacctcagattatcactacggataatacgttcgtgtcaggaaactgcgacgtggtaattggtatagtaaataatactgtgtatgatcccctccagccggagctggactcattcaaagaggaattagataagtacttcaaaaatcacacaagccctgatgtggacttgggagatatctcaggaattaacgcttccgttgtcaacatccaaaaagagatagacaggctgaatgaagtagcgaaaaacctgaacgaatccctgattgacttgcaagagctgggcaaatacgaacagtatattaaatggccctggtatatttggttggggttcatcgctggtttaatcgctattgttatggtcaccattatgctttgttgtatgacgtcctgttgttcttgtctaaagggctgctgttcgtgcggttcctgctgtaaattcgatgaggatgactccgaacccgttctgaaaggcgtcaagctccattatacttaatgaaagtcc

SEQ ID NO: 169 - DNA, 3819 bp, synthetic construct; identical to SEQ ID NO: 161
  misc_feature 1..3819: note = encodes recombinant coronavirus Spike (S) polypeptide
  source 1..3819: mol_type = other DNA

SEQ ID NO: 170 - protein, 1270 aa, synthetic construct
  REGION 1..1270: note = recombinant coronavirus Spike (S) polypeptide
MFVFLVLLPLVSSQCVNLTTRTQLPPAYTNSFTRGVYYPDKVFRSSVLHSTQDLFLPFFSNVTWFHVISGTNGTKRFDNPVLPFNDGVYFASIEKSNIIRGWIFGTTLDSKTQSLLIVNNATNVVIKVCEFQFCNDPFLDHKNNKSWMESEFRVYSSANNCTFEYVSQPFLMDLEGKQGNFKNLREFVFKNIDGYFKIYSKHTPIIVREPEDLPQGFSALEPLVDLPIGINITRFQTLLALHRSYLTPGDSSSGWTAGAAAYYVGYLQPRTFLLKYNENGTITDAVDCALDPLSETKCTLKSFTVEKGIYQTSNFRVQPTESIVRFPNITNLCPFDEVFNATRFASVYAWNRKRISNCVADYSVLYNSAPFFTFKCYGVSPTKLNDLCFTNVYADSFVIRGDEVRQIAPGQTGNIADYNYKLPDDFTGCVIAWNSNKLDSKVSGNYNYLYRLFRKSNLKPFERDISTEIYQAGNKPCNGVAGFNCYFPLRSYSFRPTYGVGHQPYRVVVLSFELLHAPATVCGPKKSTNLVKNKCVNFNFNGLKGTGVLTESNKKFLPFQQFGRDIADTTDAVRDPQTLEILDITPCSFGGVSVITPGTNTSNQVAVLYQGVNCTEVPVAIHADQLTPTWRVYSTGSNVFQTRAGCLIGAEYVNNSYECDIPIGAGICASYQTQTKSHQQAQSVASQSIIAYTMSLGAENSVAYSNNSIAIPTNFTISVTTEILPVSMTKTSVDCTMYICGDSTECSNLLLQYGSFCTQLKRALTGIAVEQDKNTQEVFAQVKQIYKTPPIKYFGGFNFSQILPDPSKPSKRSFIEDLLFNKVTLADAGFIKQYGDCLGDIAARDLICAQKFKGLTVLPPLLTDEMIAQYTSALLAGTITSGWTFGAGAALQIPFAMQMAYRFNGIGVTQNVLYENQKLIANQFNSAIGKIQDSLSSTASALGKLQDVVNHNAQALNTLVKQLSSKFGAISSVLNDIFSRLDPPEAEVQIDRLITGRLQSLQTYVTQQLIRAAEIRASANLAATKMSECVLGQSKRVDFCGKGYHLMSFPQSAPHGVVFLHVTYVPAQEKNFTTAPAICHDGKAHFPREGVFVSNGTHWFVTQRNFYEPQIITTDNTFVSGNCDVVIGIVNNTVYDPLQPELDSFKEELDKYFKNHTSPDVDLGDISGINASVVNIQKEIDRLNEVAKNLNESLIDLQELGKYEQYIKWPWYIWLGFIAGLIAIVMVTIMLCCMTSCCSCLKGCCSCGSCCKFDEDDSEPVLKGVKLHYT

SEQ ID NO: 171 - DNA, 3834 bp, synthetic construct
  misc_feature 1..3834: note = encodes recombinant coronavirus Spike (S) polypeptide
  source 1..3834: mol_type = other DNA
ggatccgccaccatgtttgtttttctcgtactacttccactagtatctagccaatgtgtaaatttaaccacgaggacgcagctgcctccggcatatacgaatagtttcactaggggagtctattatccagataaagtgttccgaagcagtgttctacattcaacacaggacctcttccttcctttctttagcaacgtcacgtggttccatgtcataagcggcacaaacggcacaaagcgcttcgataatccggtgcttccgtttaacgatggggtttattttgcttctattgaaaagagcaacattatacgcggttggatcttcggaactacattggatagtaaaacgcaatcattgctaatcgttaataacgcgactaatgtagtgattaaggtgtgcgagttccagttttgcaatgacccctttttggatcataaaaataataaatcgtggatggaatcagaatttcgtgtatattcaagcgcaaacaactgtacgttcgagtacgtgagtcagcccttcttgatggatctggaagggaagcagggcaattttaaaaacttacgtgagtttgtatttaagaatatcgacgggtatttcaagatttactcaaagcacacaccgattattgttcgagagccggaagatttaccccaaggcttctcagcactggaacccttggtagacctacctatcggtattaatataacccgcttccaaaccttgttagcgctgcatcggagttatttaacccccggagactcatcgagcgggtggaccgccggggctgcagcttattacgtggggtatttacaaccacggacgttcttactcaagtacaacgagaacgggacgattactgatgccgtcgactgtgctttggacccgctgagcgaaaccaagtgcacactcaagtctttcacggtagagaaggggatctaccagacatcaaattttcgggtacaaccaacggagtccatcgtacgctttccgaatatcacgaatctttgtccattcgatgaggtattcaatgctacgcgttttgcgagtgtgtacgcgtggaataggaagcgtatctcaaattgcgtcgctgattactccgtactctataacagcgcgcccttctttaccttcaaatgctacggggtttctcctactaaactaaacgatctatgttttacgaacgtctacgcagacagctttgttatacgaggggacgaggttcggcagatcgcccccggccaaacaggaaacatcgccgactataattacaaactcccagatgactttactggttgcgtaattgcgtggaactctaacaagttagactccaaggtctcgggaaactacaattacctgtaccgtctcttcagaaaatctaacttaaagcctttcgagcgagatattagcactgaaatctatcaggcgggtaataaaccctgtaacggggtcgccggttttaactgctactttcctcttcggtcgtattcctttcgcccgacctatggagttggacaccaaccttatagagtcgttgttctaagttttgaattgctccatgccccggcgacggtatgcgggccaaagaaaagtactaatctcgttaagaataaatgtgtgaatttcaactttaacggacttaaaggtacgggcgtattgaccgagtcaaataaaaagtttttacccttccagcaatttggtagggatatcgcggatactactgacgcagtgagagatccacaaacacttgaaatcctagacatcaccccttgtagttttgggggagtgtctgtaatcacccctggtacaaacacttctaaccaagtcgcggttctttatcagggtgttaattgtacagaagtgcctgtcgccattcatgcagaccagctgacgcccacttggcgcgtctactcgacgggatctaatgtctttcagactcgagctggatgcctcatcggggcagaatacgtgaacaactcctatgaatgcgatattcctatcggtgctggcatttgcgcatcttatcaaacacagaccaaaagtcatcagcaagcgcaatccgttgccagtcaatctataattgcgtatacaatgtccttgggcgcggaaaattcagtcgcgtatagcaacaattctatcgctattccaacgaattttactatatcggtcacaacagagatactaccagtgtcgatgactaagacttcggtagattgcacaatgtacatatgcggagacagcacagaatgctcgaacctacttcttcaatatggttctttttgcactcagctcaagagagctcttactggcatagcagtggagcaagataaaaatacccaggaagtgtttgctcaagtaaaacagatatataaaacccctccgatcaaatattttggaggttttaacttctcacaaatactaccggacccttccaaaccatcgaaacggtccttcatagaggacttgctctttaataaggtaactttggcggatgctggttttataaagcagtatggagattgtcttggtgacatagcggccagagacctcatctgtgcacagaaattcaaaggtctaacagtacttccgcccctgctaacggacgagatgatagctcaatacaccagtgcccttctggctggaacgataaccagtggatggaccttcggcgcaggtgccgcactgcagattccgttcgcaatgcagatggcctatcggtttaatgggatcggcgtcactcaaaatgtattgtacgaaaatcagaaactcattgccaaccaattcaattcagcgataggcaagatccaggacagtctctcttccaccgcctccgccttaggtaagctacaagatgttgttaatcataacgctcaagcattgaatacgctggtaaaacaattgagcagcaaattcggcgcaattagctcagttttgaacgacatattctcccgacttgacccccccgaagctgaagtccaaatagataggctgataaccgggaggctacagtcactccaaacctacgtgactcaacagctcataagagcagccgaaataagagcctctgctaatctcgccgcgactaagatgtcagagtgtgttttaggtcaaagtaaaagggttgatttctgtggtaagggataccaccttatgtcctttccacaatcggctccacacggtgtggtctttctgcacgttacttatgtcccggctcaggagaagaatttcaccacagccccggctatttgtcatgacggcaaggcgcacttccccagagaaggcgtattcgtcagtaacggcactcactggttcgttactcaacgtaacttctacgaacctcagattataacgacagacaacacatttgtatcagggaactgtgatgtggtgatcggtatagtgaacaacacagtgtacgacccattacagccggagttagattctttcaaggaagagctggataagtacttcaagaatcacacctcgccagatgttgaccttggtgatatttcaggtataaacgcctctgtcgtgaatatccagaaagagatcgaccgtctcaacgaagtagcgaaaaatctaaacgaatcgttaattgaccttcaggagctggggaagtatgagcagtacattaagtggccctggtacatttggctgggctttattgcaggactgatagcaatagtgatggtcaccattatgttgtgctgcatgacatcctgctgctcttgtttaaaagggtgttgtagttgtggatcgtgttgcaagttcgacgaggatgattccgaacctgttctgaaaggcgtaaaattacactacacataatgaaagtcc

SEQ ID NO: 172 - DNA, 3810 bp, synthetic construct; identical to SEQ ID NO: 162
  misc_feature 1..3810: note = encodes recombinant coronavirus Spike (S) polypeptide
  source 1..3810: mol_type = other DNA

SEQ ID NO: 173 - protein, 1271 aa, synthetic construct
  REGION 1..1271: note = recombinant coronavirus Spike (S) polypeptide
MFVFLVLLPLVSSQCVNLRTRTQLPPAYTNSFTRGVYYPDKVFRSSVLHSTQDLFLPFFSNVTWFHAIHVSGTNGTKRFDNPVLPFNDGVYFASTEKSNIIRGWIFGTTLDSKTQSLLIVNNATNVVIKVCEFQFCNDPFLDVYYHKNNKSWMESGVYSSANNCTFEYVSQPFLMDLEGKQGNFKNLREFVFKNIDGYFKIYSKHTPINLVRDLPQGFSALEPLVDLPIGINITRFQTLLALHRSYLTPGDSSSGWTAGAAAYYVGYLQPRTFLLKYNENGTITDAVDCALDPLSETKCTLKSFTVEKGIYQTSNFRVQPTESIVRFPNITNLCPFGEVFNATRFASVYAWNRKRISNCVADYSVLYNSASFSTFKCYGVSPTKLNDLCFTNVYADSFVIRGDEVRQIAPGQTGKIADYNYKLPDDFTGCVIAWNSNNLDSKVGGNYNYRYRLFRKSNLKPFERDISTEIYQAGSKPCNGVEGFNCYFPLQSYGFQPTNGVGYQPYRVVVLSFELLHAPATVCGPKKSTNLVKNKCVNFNFNGLTGTGVLTESNKKFLPFQQFGRDIADTTDAVRDPQTLEILDITPCSFGGVSVITPGTNTSNQVAVLYQGVNCTEVPVAIHADQLTPTWRVYSTGSNVFQTRAGCLIGAEHVNNSYECDIPIGAGICASYQTQTNSRQQAQSVASQSIIAYTMSLGAENSVAYSNNSIAIPTNFTISVTTEILPVSMTKTSVDCTMYICGDSTECSNLLLQYGSFCTQLNRALTGIAVEQDKNTQEVFAQVKQIYKTPPIKDFGGFNFSQILPDPSKPSKRSFIEDLLFNKVTLADAGFIKQYGDCLGDIAARDLICAQKFNGLTVLPPLLTDEMIAQYTSALLAGTITSGWTFGAGAALQIPFAMQMAYRFNGIGVTQNVLYENQKLIANQFNSAIGKIQDSLSSTASALGKLQNVVNQNAQALNTLVKQLSSNFGAISSVLNDILSRLDPPEAEVQIDRLITGRLQSLQTYVTQQLIRAAEIRASANLAATKMSECVLGQSKRVDFCGKGYHLMSFPQSAPHGVVFLHVTYVPAQEKNFTTAPAICHDGKAHFPREGVFVSNGTHWFVTQRNFYEPQIITTDNTFVSGNCDVVIGIVNNTVYDPLQPELDSFKEELDKYFKNHTSPDVDLGDISGINASVVNIQKEIDRLNEVAKNLNESLIDLQELGKYEQYIKWPWYIWLGFIAGLIAIVMVTIMLCCMTSCCSCLKGCCSCGSCCKFDEDDSEPVLKGVKLHYT

SEQ ID NO: 174 - protein, 1258 aa, synthetic construct
  REGION 1..1258: note = recombinant coronavirus Spike (S) polypeptide
QCVNLTTRTQLPPAYTNSFTRGVYYPDKVFRSSVLHSTQDLFLPFFSNVTWFHVIHVSGTNGTKRFDNPVLPFNDGVYFASIEKSNIIRGWIFGTTLDSKTQSLLIVNNATNVVIKVCEFQFCNDPFLDVYYHKNNKSWMESEFRVYSSANNCTFEYVSQPFLMDLEGKQGNFKNLREFVFKNIDGYFKIYSKHTPINIVRDLPQGFSALEPLVDLPIGINITRFQTLLALHRSYLPGDSSSGWTAGAAAYYVGYLQPRTFLLKYNENGTITDAVDCALDPLSETKCTLKSFTVEKGIYQTSNFRVQPTESIVRFPNITNLCPFDEVFNATRFASVYAWNRKRISNCVADYSVLYNLAPFFTFKCYGVSPTKLNDLCFTNVYADSFVIRGDEVRQIAPGQTGNIADYNYKLPDDFTGCVIAWNSNKLDSKVSGNYNYLYRLFRKSNLKPFERDISTEIYQAGNKPCNGVAGFNCYFPLRSYSFRPTYGVGHQPYRVVVLSFELLHAPATVCGPKKSTNLVKNKCVNFNFNGLKGTGVLTESNKKFLPFQQFGRDIADTTDAVRDPQTLEILDITPCSFGGVSVITPGTNTSNQVAVLYQGVNCTEVPVAIHADQLTPTWRVYSTGSNVFQTRAGCLIGAEYVNNSYECDIPIGAGICASYQTQTKSHQQAQSVASQSIIAYTMSLGAENSVAYSNNSIAIPTNFTISVTTEILPVSMTKTSVDCTMYICGDSTECSNLLLQYGSFCTQLKRALTGIAVEQDKNTQEVFAQVKQIYKTPPIKYFGGFNFSQILPDPSKPSKRSFIEDLLFNKVTLADAGFIKQYGDCLGDIAARDLICAQKFKGLTVLPPLLTDEMIAQYTSALLAGTITSGWTFGAGAALQIPFAMQMAYRFNGIGVTQNVLYENQKLIANQFNSAIGKIQDSLSSTASALGKLQDVVNHNAQALNTLVKQLSSKFGAISSVLNDIFSRLDPPEAEVQIDRLITGRLQSLQTYVTQQLIRAAEIRASANLAATKMSECVLGQSKRVDFCGKGYHLMSFPQSAPHGVVFLHVTYVPAQEKNFTTAPAICHDGKAHFPREGVFVSNGTHWFVTQRNFYEPQIITTDNTFVSGNCDVVIGIVNNTVYDPLQPELDSFKELDKYFKNHTSPDVDLGDISGINASVVNIQKEIDRLNEVAKNLNESLIDLQELGKYEQYIKWPWYIWLGFIAGLIAIVMVTIMLCCMTSCCSCLKGCCSCGSCCKFDEDDSEPVLKGVKLHYT

SEQ ID NO: 175 - protein, 1257 aa, synthetic construct
  REGION 1..1257: note = recombinant coronavirus Spike (S) polypeptide
QCVNLTTRTQLPPAYTNSFTRGVYYPDKVFRSSVLHSTQDLFLPFFSNVTWFHVISGTNGTKRFDNPVLPFNDGVYFASIEKSNIIRGWIFGTTLDSKTQSLLIVNNATNVVIKVCEFQFCNDPFLDHKNNKSWMESEFRVYSSANNCTFEYVSQPFLMDLEGKQGNFKNLREFVFKNIDGYFKIYSKHTPIIVREPEDLPQGFSALEPLVDLPIGINITRFQTLLALHRSYLTPGDSSSGWTAGAAAYYVGYLQPRTFLLKYNENGTITDAVDCALDPLSETKCTLKSFTVEKGIYQTSNFRVQPTESIVRFPNITNLCPFDEVFNATRFASVYAWNRKRISNCVADYSVLYNLAPFFTFKCYGVSPTKLNDLCFTNVYADSFVIRGDEVRQIAPGQTGNIADYNYKLPDDFTGCVIAWNSNKLDSKVSGNYNYLYRLFRKSNLKPFERDISTEIYQAGNKPCNGVAGFNCYFPLRSYSFRPTYGVGHQPYRVVVLSFELLHAPATVCGPKKSTNLVKNKCVNFNFNGLKGTGVLTESNKKFLPFQQFGRDIADTTDAVRDPQTLEILDITPCSFGGVSVITPGTNTSNQVAVLYQGVNCTEVPVAIHADQLTPTWRVYSTGSNVFQTRAGCLIGAEYVNNSYECDIPIGAGICASYQTQTKSHQQAQSVASQSIIAYTMSLGAENSVAYSNNSIAIPTNFTISVTTEILPVSMTKTSVDCTMYICGDSTECSNLLLQYGSFCTQLKRALTGIAVEQDKNTQEVFAQVKQIYKTPPIKYFGGFNFSQILPDPSKPSKRSFIEDLLFNKVTLADAGFIKQYGDCLGDIAARDLICAQKFKGLTVLPPLLTDEMIAQYTSALLAGTITSGWTFGAGAALQIPFAMQMAYRFNGIGVTQNVLYENQKLIANQFNSAIGKIQDSLSSTASALGKLQDVVNHNAQALNTLVKQLSSKFGAISSVLNDIFSRLDPPEAEVQIDRLITGRLQSLQTYVTQQLIRAAEIRASANLAATKMSECVLGQSKRVDFCGKGYHLMSFPQSAPHGVVFLHVTYVPAQEKNFTTAPAICHDGKAHFPREGVFVSNGTHWFVTQRNFYEPQIITTDNTFVSGNCDVVIGIVNNTVYDPLQPELDSFKEELDKYFKNHTSPDVDLGDISGINASVVNIQKEIDRLNEVAKNLNESLIDLQELGKYEQYIKWPWYIWLGFIAGLIAIVMVTIMLCCMTSCCSCLKGCCSCGSCCKFDEDDSEPVLKGVKLHYT

SEQ ID NO: 176 - protein, 1258 aa, synthetic construct
  REGION 1..1258: note = recombinant coronavirus Spike (S) polypeptide
QCVNLRTRTQLPPAYTNSFTRGVYYPDKVFRSSVLHSTQDLFLPFFSNVTWFHAIHVSGTNGTKRFDNPVLPFNDGVYFASTEKSNIIRGWIFGTTLDSKTQSLLIVNNATNVVIKVCEFQFCNDPFLDVYYHKNNKSWMESGVYSSANNCTFEYVSQPFLMDLEGKQGNFKNLREFVFKNIDGYFKIYSKHTPINLVRDLPQGFSALEPLVDLPIGINITRFQTLLALHRSYLTPGDSSSGWTAGAAAYYVGYLQPRTFLLKYNENGTITDAVDCALDPLSETKCTLKSFTVEKGIYQTSNFRVQPTESIVRFPNITNLCPFGEVFNATRFASVYAWNRKRISNCVADYSVLYNSASFSTFKCYGVSPTKLNDLCFTNVYADSFVIRGDEVRQIAPGQTGKIADYNYKLPDDFTGCVIAWNSNNLDSKVGGNYNYRYRLFRKSNLKPFERDISTEIYQAGSKPCNGVEGFNCYFPLQSYGFQPTNGVGYQPYRVVVLSFELLHAPATVCGPKKSTNLVKNKCVNFNFNGLTGTGVLTESNKKFLPFQQFGRDIADTTDAVRDPQTLEILDITPCSFGGVSVITPGTNTSNQVAVLYQGVNCTEVPVAIHADQLTPTWRVYSTGSNVFQTRAGCLIGAEHVNNSYECDIPIGAGICASYQTQTNSRQQAQSVASQSIIAYTMSLGAENSVAYSNNSIAIPTNFTISVTTEILPVSMTKTSVDCTMYICGDSTECSNLLLQYGSFCTQLNRALTGIAVEQDKNTQEVFAQVKQIYKTPPIKDFGGFNFSQILPDPSKPSKRSFIEDLLFNKVTLADAGFIKQYGDCLGDIAARDLICAQKFNGLTVLPPLLTDEMIAQYTSALLAGTITSGWTFGAGAALQIPFAMQMAYRFNGIGVTQNVLYENQKLIANQFNSAIGKIQDSLSSTASALGKLQNVVNQNAQALNTLVKQLSSNFGAISSVLNDILSRLDPPEAEVQIDRLITGRLQSLQTYVTQQLIRAAEIRASANLAATKMSECVLGQSKRVDFCGKGYHLMSFPQSAPHGVVFLHVTYVPAQEKNFTTAPAICHDGKAHFPREGVFVSNGTHWFVTQRNFYEPQIITTDNTFVSGNCDVVIGIVNNTVYDPLQPELDSFKEELDKYFKNHTSPDVDLGDISGINASVVNIQKEIDRLNEVAKNLNESLIDLQELGKYEQYIKWPWYIWLGFIAGLIAIVMVTIMLCCMTSCCSCLKGCCSCGSCCKFDEDDSEPVLKGVKLHYT

SEQ ID NO: 177 - protein, 1273 aa, synthetic construct
  REGION 1..1273: note = Recombinant SARS-CoV-2 S Polypeptide
MFVFLVLLPLVSSQCVNLTTRTQLPPAYTNSFTRGVYYPDKVFRSSVLHSTQDLFLPFFSNVTWFHAIHVSGTNGTKRFDNPVLPFNDGVYFASIEKSNIIRGWIFGTTLDSKTQSLLIVNNATNVVIKVCEFQFCNDPFLDVYYHKNNKSWMKSEFRVYSSANNCTFEYVSQPFLMDLEGKQGNFKNLREFVFKNIDGYFKIYSKHTPINLVRDLPQGFSALEPLVDLPIGINITRFQTLLALHRSYLTPGDSSSGWTAGAAAYYVGYLQPRTFLLKYNENGTITDAVDCALDPLSETKCTLKSFTVEKGIYQTSNFRVQPTESIVRFPNITNLCPFGEVFNATRFASVYAWNRKRISNCVADYSVLYNSASFSTFKCYGVSPTKLNDLCFTNVYADSFVIRGDEVRQIAPGQTGKIADYNYKLPDDFTGCVIAWNSNNLDSKVGGNYNYRYRLFRKSNLKPFERDISTEIYQAGSTPCNGVQGFNCYFPLQSYGFQPTNGVGYQPYRVVVLSFELLHAPATVCGPKKSTNLVKNKCVNFNFNGLTGTGVLTESNKKFLPFQQFGRDIADTTDAVRDPQTLEILDITPCSFGGVSVITPGTNTSNQVAVLYQGVNCTEVPVAIHADQLTPTWRVYSTGSNVFQTRAGCLIGAEHVNNSYECDIPIGAGICASYQTQTNSRQQAQSVASQSIIAYTMSLGAENSVAYSNNSIAIPTNFTISVTTEILPVSMTKTSVDCTMYICGDSTECSNLLLQYGSFCTQLNRALTGIAVEQDKNTQEVFAQVKQIYKTPPIKDFGGFNFSQILPDPSKPSKRSFIEDLLFNKVTLADAGFIKQYGDCLGDIAARDLICAQKFNGLTVLPPLLTDEMIAQYTSALLAGTITSGWTFGAGAALQIPFAMQMAYRFNGIGVTQNVLYENQKLIANQFNSAIGKIQDSLSSTASALGKLQDVVNQNAQALNTLVKQLSSNFGAISSVLNDILSRLDPPEAEVQIDRLITGRLQSLQTYVTQQLIRAAEIRASANLAATKMSECVLGQSKRVDFCGKGYHLMSFPQSAPHGVVFLHVTYVPAHEKNFTTAPAICHDGKAHFPREGVFVSNGTHWFVTQRNFYEPQIITTDNTFVSGNCDVVIGIVNNTVYDPLQPELDSFKEELDKYFKNHTSPDVDLGDISGINASVVNIQKEIDRLNEVAKNLNESLIDLQELGKYEQYIKWPWYIWLGFIAGLIAIVMVTIMLCCMTSCCSCLKGCCSCGSCCKFDEDDSEPVLKGVKLHYT

SEQ ID NO: 178 - protein, 1271 aa, synthetic construct
  REGION 1..1271: note = Recombinant SARS-CoV-2 S Polypeptide
MFVFLVLLPLVSSQCVNLRTRTQLPPAYTNSFTRGVYYPDKVFRSSVLHSTQDLFLPFFSNVTWFHAIHVSGTNGTKRFDNPVLPFNDGVYFASTEKSNIIRGWIFGTTLDSKTQSLLIVNNATNVVIKVCEFQFCNDPFLDVYYHKNNKSWMESGVYSSANNCTFEYVSQPFLMDLEGKQGNFKNLREFVFKNIDGYFKIYSKHTPINLVRDLPQGFSALEPLVDLPIGINITRFQTLLALHRSYLTPGDSSSGITAGAAAYYVGYLQPRTFLLKYNENGTITDAVDCALDPLSETKCTLKSFTVEKGIYQTSNFRVQPTESIVRFPNITNLCPFGEVFNATRFASVYAWNRKRISNCVADYSVLYNSASFSTFKCYGVSPTKLNDLCFTNVYADSFVIRGDEVRQIAPGQTGNIADYNYKLPDDFTGCVIAWNSNNLDSKVGGNYNYRYRLFRKSNLKPFERDISTEIYQAGSKPCNGVEGFNCYFPLQSYGFQPTNGVGYQPYRVVVLSFELLHAPATVCGPKKSTNLVKNKCVNFNFNGLTGTGVLTESNKKFLPFQQFGRDIADTTDAVRDPQTLEILDITPCSFGGVSVITPGTNTSNQVAVLYQGVNCTEVPVAIHADQLTPTWRVYSTGSNVFQTRAGCLIGAEHVNNSYECDIPIGAGICASYQTQTNSRQQAQSVASQSIIAYTMSLGAENSVAYSNNSIAIPTNFTISVTTEILPVSMTKTSVDCTMYICGDSTECSNLLLQYGSFCTQLNRALTGIAVEQDKNTQEVFAQVKQIYKTPPIKDFGGFNFSQILPDPSKPSKRSFIEDLLFNKVTLADAGFIKQYGDCLGDIAARDLICAQKFNGLTVLPPLLTDEMIAQYTSALLAGTITSGWTFGAGAALQIPFAMQMAYRFNGIGVTQNVLYENQKLIANQFNSAIGKIQDSLSSTASALGKLQNVVNQNAQALNTLVKQLSSNFGAISSVLNDILSRLDPPEAEVQIDRLITGRLQSLQTYVTQQLIRAAEIRASANLAATKMSECVLGQSKRVDFCGKGYHLMSFPQSAPHGVVFLHVTYVPAQEKNFTTAPAICHDGKAHFPREGVFVSNGTHWFVTQRNFYEPQIITTDNTFVSGNCDVVIGIVNNTVYDPLQPELDSFKEELDKYFKNHTSPDVDLGDISGINASVVNIQKEIDRLNEVAKNLNESLIDLQELGKYEQYIKWPWYIWLGFIAGLIAIVMVTIMLCCMTSCCSCLKGCCSCGSCCKFDEDDSEPVLKGVKLHYT

SEQ ID NO: 179 - protein, 1273 aa, synthetic construct
  REGION 1..1273: note = Recombinant SARS-CoV-2 S Polypeptide
MFVFLVLLPLVSSQCVNLTTRTQLPPAYTNSFTRGVYYPDKVFRSSVLHSTQDLFLPFFSNVTWFHAIHVSGTNGTKRFDNPVLPFNDGVYFASIEKSNIIRGWIFGTTLDSKTQSLLIVNNATNVVIKVCEFQFCNDPFLGVSNHKNNKSWMESEFRVYSSANNCTFEYVSQPFLMDLEGKQGNFKNLREFVFKNIDGYFKIYSKHTPINLVRDLPQGFSALEPLVDLPIGINITRFQTLLALHRSYLTPGDSSSGWTAGAAAYYVGYLQPRTFLLKYNENGTITDAVDCALDPLSETKCTLKSFTVEKGIYQTSNFRVQPTESIVRFPNITNLCPFGEVFNATKFASVYAWNRKRISNCVADYSVLYNSASFSTFKCYGVSPTKLNDLCFTNVYADSFVIRGDEVRQIAPGQTGKIADYNYKLPDDFTGCVIAWNSNNLDSKVGGNYNYLYRLFRKSNLKPFERDISTEIYQAGSTPCNGVKGFNCYFPLQSYGFQPTYGVGYQPYRVVVLSFELLHAPATVCGPKKSTNLVKNKCVNFNFNGLTGTGVLTESNKKFLPFQQFGRDIADTTDAVRDPQTLEILDITPCSFGGVSVITPGTNTSNQVAVLYQGVNCTEVPVAIHADQLTPTWRVYSTGSNVFQTRAGCLIGAEHVNNSYECDIPIGAGICASYQTQTNSHQQAQSVASQSIIAYTMSLGAENSVAYSNNSIAIPTNFTISVTTEILPVSMTKTSVDCTMYICGDSTECSNLLLQYGSFCTQLNRALTGIAVEQDKNTQEVFAQVKQIYKTPPIKDFGGFNFSQILPDPSKPSKRSFIEDLLFNKVTLADAGFIKQYGDCLGDIAARDLICAQKFNGLTVLPPLLTDEMIAQYTSALLAGTITSGWTFGAGAALQIPFAMQMAYRFNGIGVTQNVLYENQKLIANQFNSAIGKIQDSLSSTASALGKLQNVVNQNAQALNTLVKQLSSNFGAISSVLNDILSRLDPPEAEVQIDRLITGRLQSLQTYVTQQLIRAAEIRASANLAATKMSECVLGQSKRVDFCGKGYHLMSFPQSAPHGVVFLHVTYVPAQEKNFTTAPAICHDGKAHFPREGVFVSNGTHWFVTQRNFYEPQIITTDNTFVSGNCDVVIGIVNNTVYDPLQPELDSFKEELDKYFKNHTSPDVDLGDISGINASVVNIQKEIDRLNEVAKNLNESLIDLQELGKYEQYIKWPWYIWLGFIAGLIAIVMVTIMLCCMTSCCSCLKGCCSCGSCCKFDEDDSEPVLKGVKLHYT

SEQ ID NO: 180 - protein, 1274 aa, synthetic construct
  REGION 1..1274: note = Recombinant SARS-CoV-2 S Polypeptide
MFVFLVLLPLVSSQCVNLTTRTQLPPAYTNSFTRGVYYPDKVFRSSVLHSTQDLFLPFFSNVTWFHAIHVSGTNGTKRFDNPVLPFNDGVYFASIEKSNIIRGWIFGTTLDSKTQSLLIVNNATNVVIKVCEFQFCNDPFLGVTSNHKNNKSWMESEFRVYSSANNCTFEYVSQPFLMDLEGKQGNFKNLREFVFKNIDGYFKIYSKHTPINLVRDLPQGFSALEPLVDLPIGINITRFQTLLALHRSYLTPGDSSSGWTAGAAAYYVGYLQPRTFLLKYNENGTITDAVDCALDPLSETKCTLKSFTVEKGIYQTSNFRVQPTESIVRFPNITNLCPFGEVFNATKFASVYAWNRKRISNCVADYSVLYNSASFSTFKCYGVSPTKLNDLCFTNVYADSFVIRGDEVRQIAPGQTGKIADYNYKLPDDFTGCVIAWNSNNLDSKVGGNYNYLYRLFRKSNLKPFERDISTEIYQAGSTPCNGVKGFNCYFPLQSYGFQPTYGVGYQPYRVVVLSFELLHAPATVCGPKKSTNLVKNKCVNFNFNGLTGTGVLTESNKKFLPFQQFGRDIADTTDAVRDPQTLEILDITPCSFGGVSVITPGTNTSNQVAVLYQGVNCTEVPVAIHADQLTPTWRVYSTGSNVFQTRAGCLIGAEHVNNSYECDIPIGAGICASYQTQTNSHQQAQSVASQSIIAYTMSLGAENSVAYSNNSIAIPTNFTISVTTEILPVSMTKTSVDCTMYICGDSTECSNLLLQYGSFCTQLNRALTGIAVEQDKNTQEVFAQVKQIYKTPPIKDFGGFNFSQILPDPSKPSKRSFIEDLLFNKVTLADAGFIKQYGDCLGDIAARDLICAQKFNGLTVLPPLLTDEMIAQYTSALLAGTITSGWTFGAGAALQIPFAMQMAYRFNGIGVTQNVLYENQKLIANQFNSAIGKIQDSLSSTASALGKLQNVVNQNAQALNTLVKQLSSNFGAISSVLNDILSRLDPPEAEVQIDRLITGRLQSLQTYVTQQLIRAAEIRASANLAATKMSECVLGQSKRVDFCGKGYHLMSFPQSAPHGVVFLHVTYVPAQEKNFTTAPAICHDGKAHFPREGVFVSNGTHWFVTQRNFYEPQIITTDNTFVSGNCDVVIGIVNNTVYDPLQPELDSFKEELDKYFKNHTSPDVDLGDISGINASVVNIQKEIDRLNEVAKNLNESLIDLQELGKYEQYIKWPWYIWLGFIAGLIAIVMVTIMLCCMTSCCSCLKGCCSCGSCCKFDEDDSEPVLKGVKLHYT

SEQ ID NO: 181 - protein, 1260 aa, synthetic construct
  REGION 1..1260: note = Recombinant SARS-CoV-2 S Polypeptide
QCVNLTTRTQLPPAYTNSFTRGVYYPDKVFRSSVLHSTQDLFLPFFSNVTWFHAIHVSGTNGTKRFDNPVLPFNDGVYFASIEKSNIIRGWIFGTTLDSKTQSLLIVNNATNVVIKVCEFQFCNDPFLDVYYHKNNKSWMKSEFRVYSSANNCTFEYVSQPFLMDLEGKQGNFKNLREFVFKNIDGYFKIYSKHTPINLVRDLPQGFSALEPLVDLPIGINITRFQTLLALHRSYLTPGDSSSGWTAGAAAYYVGYLQPRTFLLKYNENGTITDAVDCALDPLSETKCTLKSFTVEKGIYQTSNFRVQPTESIVRFPNITNLCPFGEVFNATRFASVYAWNRKRISNCVADYSVLYNSASFSTFKCYGVSPTKLNDLCFTNVYADSFVIRGDEVRQIAPGQTGKIADYNYKLPDDFTGCVIAWNSNNLDSKVGGNYNYRYRLFRKSNLKPFERDISTEIYQAGSTPCNGVQGFNCYFPLQSYGFQPTNGVGYQPYRVVVLSFELLHAPATVCGPKKSTNLVKNKCVNFNFNGLTGTGVLTESNKKFLPFQQFGRDIADTTDAVRDPQTLEILDITPCSFGGVSVITPGTNTSNQVAVLYQGVNCTEVPVAIHADQLTPTWRVYSTGSNVFQTRAGCLIGAEHVNNSYECDIPIGAGICASYQTQTNSRQQAQSVASQSIIAYTMSLGAENSVAYSNNSIAIPTNFTISVTTEILPVSMTKTSVDCTMYICGDSTECSNLLLQYGSFCTQLNRALTGIAVEQDKNTQEVFAQVKQIYKTPPIKDFGGFNFSQILPDPSKPSKRSFIEDLLFNKVTLADAGFIKQYGDCLGDIAARDLICAQKFNGLTVLPPLLTDEMIAQYTSALLAGTITSGWTFGAGAALQIPFAMQMAYRFNGIGVTQNVLYENQKLIANQFNSAIGKIQDSLSSTASALGKLQDVVNQNAQALNTLVKQLSSNFGAISSVLNDILSRLDPPEAEVQIDRLITGRLQSLQTYVTQQLIRAAEIRASANLAATKMSECVLGQSKRVDFCGKGYHLMSFPQSAPHGVVFLHVTYVPAHEKNFTTAPAICHDGKAHFPREGVFVSNGTHWFVTQRNFYEPQIITTDNTFVSGNCDVVIGIVNNTVYDPLQPELDSFKEELDKYFKNHTSPDVDLGDISGINASVVNIQKEIDRLNEVAKNLNESLIDLQELGKYEQYIKWPWYIWLGFIAGLIAIVMVTIMLCCMTSCCSCLKGCCSCGSCCKFDEDDSEPVLKGVKLHYT

SEQ ID NO: 182 - protein, 1258 aa, synthetic construct
  REGION 1..1258: note = Recombinant SARS-CoV-2 S Polypeptide
QCVNLRTRTQLPPAYTNSFTRGVYYPDKVFRSSVLHSTQDLFLPFFSNVTWFHAIHVSGTNGTKRFDNPVLPFNDGVYFASTEKSNIIRGWIFGTTLDSKTQSLLIVNNATNVVIKVCEFQFCNDPFLDVYYHKNNKSWMESGVYSSANNCTFEYVSQPFLMDLEGKQGNFKNLREFVFKNIDGYFKIYSKHTPINLVRDLPQGFSALEPLVDLPIGINITRFQTLLALHRSYLTPGDSSSGITAGAAAYYVGYLQPRTFLLKYNENGTITDAVDCALDPLSETKCTLKSFTVEKGIYQTSNFRVQPTESIVRFPNITNLCPFGEVFNATRFASVYAWNRKRISNCVADYSVLYNSASFSTFKCYGVSPTKLNDLCFTNVYADSFVIRGDEVRQIAPGQTGNIADYNYKLPDDFTGCVIAWNSNNLDSKVGGNYNYRYRLFRKSNLKPFERDISTEIYQAGSKPCNGVEGFNCYFPLQSYGFQPTNGVGYQPYRVVVLSFELLHAPATVCGPKKSTNLVKNKCVNFNFNGLTGTGVLTESNKKFLPFQQFGRDIADTTDAVRDPQTLEILDITPCSFGGVSVITPGTNTSNQVAVLYQGVNCTEVPVAIHADQLTPTWRVYSTGSNVFQTRAGCLIGAEHVNNSYECDIPIGAGICASYQTQTNSRQQAQSVASQSIIAYTMSLGAENSVAYSNNSIAIPTNFTISVTTEILPVSMTKTSVDCTMYICGDSTECSNLLLQYGSFCTQLNRALTGIAVEQDKNTQEVFAQVKQIYKTPPIKDFGGFNFSQILPDPSKPSKRSFIEDLLFNKVTLADAGFIKQYGDCLGDIAARDLICAQKFNGLTVLPPLLTDEMIAQYTSALLAGTITSGWTFGAGAALQIPFAMQMAYRFNGIGVTQNVLYENQKLIANQFNSAIGKIQDSLSSTASALGKLQNVVNQNAQALNTLVKQLSSNFGAISSVLNDILSRLDPPEAEVQIDRLITGRLQSLQTYVTQQLIRAAEIRASANLAATKMSECVLGQSKRVDFCGKGYHLMSFPQSAPHGVVFLHVTYVPAQEKNFTTAPAICHDGKAHFPREGVFVSNGTHWFVTQRNFYEPQIITTDNTFVSGNCDVVIGIVNNTVYDPLQPELDSFKEELDKYFKNHTSPDVDLGDISGINASVVNIQKEIDRLNEVAKNLNESLIDLQELGKYEQYIKWPWYIWLGFIAGLIAIVMVTIMLCCMTSCCSCLKGCCSCGSCCKFDEDDSEPVLKGVKLHYT

SEQ ID NO: 183 - protein, 1260 aa, synthetic construct
  REGION 1..1260: note = Recombinant SARS-CoV-2 S Polypeptide
QCVNLTTRTQLPPAYTNSFTRGVYYPDKVFRSSVLHSTQDLFLPFFSNVTWFHAIHVSGTNGTKRFDNPVLPFNDGVYFASIEKSNIIRGWIFGTTLDSKTQSLLIVNNATNVVIKVCEFQFCNDPFLGVSNHKNNKSWMESEFRVYSSANNCTFEYVSQPFLMDLEGKQGNFKNLREFVFKNIDGYFKIYSKHTPINLVRDLPQGFSALEPLVDLPIGINITRFQTLLALHRSYLTPGDSSSGWTAGAAAYYVGYLQPRTFLLKYNENGTITDAVDCALDPLSETKCTLKSFTVEKGIYQTSNFRVQPTESIVRFPNITNLCPFGEVFNATKFASVYAWNRKRISNCVADYSVLYNSASFSTFKCYGVSPTKLNDLCFTNVYADSFVIRGDEVRQIAPGQTGKIADYNYKLPDDFTGCVIAWNSNNLDSKVGGNYNYLYRLFRKSNLKPFERDISTEIYQAGSTPCNGVKGFNCYFPLQSYGFQPTYGVGYQPYRVVVLSFELLHAPATVCGPKKSTNLVKNKCVNFNFNGLTGTGVLTESNKKFLPFQQFGRDIADTTDAVRDPQTLEILDITPCSFGGVSVITPGTNTSNQVAVLYQGVNCTEVPVAIHADQLTPTWRVYSTGSNVFQTRAGCLIGAEHVNNSYECDIPIGAGICASYQTQTNSHQQAQSVASQSIIAYTMSLGAENSVAYSNNSIAIPTNFTISVTTEILPVSMTKTSVDCTMYICGDSTECSNLLLQYGSFCTQLNRALTGIAVEQDKNTQEVFAQVKQIYKTPPIKDFGGFNFSQILPDPSKPSKRSFIEDLLFNKVTLADAGFIKQYGDCLGDIAARDLICAQKFNGLTVLPPLLTDEMIAQYTSALLAGTITSGWTFGAGAALQIPFAMQMAYRFNGIGVTQNVLYENQKLIANQFNSAIGKIQDSLSSTASALGKLQNVVNQNAQALNTLVKQLSSNFGAISSVLNDILSRLDPPEAEVQIDRLITGRLQSLQTYVTQQLIRAAEIRASANLAATKMSECVLGQSKRVDFCGKGYHLMSFPQSAPHGVVFLHVTYVPAQEKNFTTAPAICHDGKAHFPREGVFVSNGTHWFVTQRNFYEPQIITTDNTFVSGNCDVVIGIVNNTVYDPLQPELDSFKEELDKYFKNHTSPDVDLGDISGINASVVNIQKEIDRLNEVAKNLNESLIDLQELGKYEQYIKWPWYIWLGFIAGLIAIVMVTIMLCCMTSCCSCLKGCCSCGSCCKFDEDDSEPVLKGVKLHYT

SEQ ID NO: 184 - protein, 1261 aa, synthetic construct
  REGION 1..1261: note = Recombinant SARS-CoV-2 S Polypeptide
QCVNLTTRTQLPPAYTNSFTRGVYYPDKVFRSSVLHSTQDLFLPFFSNVTWFHAIHVSGTNGTKRFDNPVLPFNDGVYFASIEKSNIIRGWIFGTTLDSKTQSLLIVNNATNVVIKVCEFQFCNDPFLGVTSNHKNNKSWMESEFRVYSSANNCTFEYVSQPFLMDLEGKQGNFKNLREFVFKNIDGYFKIYSKHTPINLVRDLPQGFSALEPLVDLPIGINITRFQTLLALHRSYLTPGDSSSGWTAGAAAYYVGYLQPRTFLLKYNENGTITDAVDCALDPLSETKCTLKSFTVEKGIYQTSNFRVQPTESIVRFPNITNLCPFGEVFNATKFASVYAWNRKRISNCVADYSVLYNSASFSTFKCYGVSPTKLNDLCFTNVYADSFVIRGDEVRQIAPGQTGKIADYNYKLPDDFTGCVIAWNSNNLDSKVGGNYNYLYRLFRKSNLKPFERDISTEIYQAGSTPCNGVKGFNCYFPLQSYGFQPTYGVGYQPYRVVVLSFELLHAPATVCGPKKSTNLVKNKCVNFNFNGLTGTGVLTESNKKFLPFQQFGRDIADTTDAVRDPQTLEILDITPCSFGGVSVITPGTNTSNQVAVLYQGVNCTEVPVAIHADQLTPTWRVYSTGSNVFQTRAGCLIGAEHVNNSYECDIPIGAGICASYQTQTNSHQQAQSVASQSIIAYTMSLGAENSVAYSNNSIAIPTNFTISVTTEILPVSMTKTSVDCTMYICGDSTECSNLLLQYGSFCTQLNRALTGIAVEQDKNTQEVFAQVKQIYKTPPIKDFGGFNFSQILPDPSKPSKRSFIEDLLFNKVTLADAGFIKQYGDCLGDIAARDLICAQKFNGLTVLPPLLTDEMIAQYTSALLAGTITSGWTFGAGAALQIPFAMQMAYRFNGIGVTQNVLYENQKLIANQFNSAIGKIQDSLSSTASALGKLQNVVNQNAQALNTLVKQLSSNFGAISSVLNDILSRLDPPEAEVQIDRLITGRLQSLQTYVTQQLIRAAEIRASANLAATKMSECVLGQSKRVDFCGKGYHLMSFPQSAPHGVVFLHVTYVPAQEKNFTTAPAICHDGKAHFPREGVFVSNGTHWFVTQRNFYEPQIITTDNTFVSGNCDVVIGIVNNTVYDPLQPELDSFKEELDKYFKNHTSPDVDLGDISGINASVVNIQKEIDRLNEVAKNLNESLIDLQELGKYEQYIKWPWYIWLGFIAGLIAIVMVTIMLCCMTSCCSCLKGCCSCGSCCKFDEDDSEPVLKGVKLHYT

SEQ ID NO: 185 - protein, 1270 aa, synthetic construct
  REGION 1..1270: note = Recombinant SARS-CoV-2 S Polypeptide
MFVFLVLLPLVSSQCVNLITRTQSYTNSFTRGVYYPDKVFRSSVLHSTQDLFLPFFSNVTWFHAIHVSGTNGTKRFDNPVLPFNDGVYFASTEKSNIIRGWIFGTTLDSKTQSLLIVNNATNVVIKVCEFQFCNDPFLDVYYHKNNKSWMESEFRVYSSANNCTFEYVSQPFLMDLEGKQGNFKNLREFVFKNIDGYFKIYSKHTPINLGRDLPQGFSALEPLVDLPIGINITRFQTLLALHRSYLTPGDSSSGWTAGAAAYYVGYLQPRTFLLKYNENGTITDAVDCALDPLSETKCTLKSFTVEKGIYQTSNFRVQPTESIVRFPNITNLCPFDEVFNATRFASVYAWNRKRISNCVADYSVLYNFAPFFAFKCYGVSPTKLNDLCFTNVYADSFVIRGNEVRQIAPGQTGNIADYNYKLPDDFTGCVIAWNSNKLDSKVGGNYNYQYRLFRKSNLKPFERDISTEIYQAGNKPCNGVAGFNCYFPLRSYGFRPTYGVGHQPYRVVVLSFELLHAPATVCGPKKSTNLVKNKCVNFNFNGLTGTGVLTESNKKFLPFQQFGRDIADTTDAVRDPQTLEILDITPCSFGGVSVITPGTNTSNQVAVLYQGVNCTEVPVAIHADQLTPTWRVYSTGSNVFQTRAGCLIGAEYVNNSYECDIPIGAGICASYQTQTKSHQQAQSVASQSIIAYTMSLGAENLVAYSNNSIAIPTNFTISVTTEILPVSMTKTSVDCTMYICGDSTECSNLLLQYGSFCTQLKRALTGIAVEQDKNTQEVFAQVKQIYKTPPIKYFGGFNFSQILPDPSKPSKRSFIEDLLFNKVTLADAGFIKQYGDCLGDIAARDLICAQKFNGLTVLPPLLTDEMIAQYTSALLAGTITSGWTFGAGAALQIPFAMQMAYRFNGIGVTQNVLYENQKLIANQFNSAIGKIQDSLSSTASALGKLQDVVNHNAQALNTLVKQLSSKFGAISSVLNDILSRLDPPEAEVQIDRLITGRLQSLQTYVTQQLIRAAEIRASANLAATKMSECVLGQSKRVDFCGKGYHLMSFPQSAPHGVVFLHVTYVPAQEKNFTTAPAICHDGKAHFPREGVFVSNGTHWFVTQRNFYEPQIITTDNTFVSGNCDVVIGIVNNTVYDPLQPELDSFKEELDKYFKNHTSPDVDLGDISGINASVVNIQKEIDRLNEVAKNLNESLIDLQELGKYEQYIKWPWYIWLGFIAGLIAIVMVTIMLCCMTSCCSCLKGCCSCGSCCKFDEDDSEPVLKGVKLHYT

SEQ ID NO: 186 - protein, 1257 aa, synthetic construct
  REGION 1..1257: note = Recombinant SARS-CoV-2 S Polypeptide
QCVNLITRTQSYTNSFTRGVYYPDKVFRSSVLHSTQDLFLPFFSNVTWFHAIHVSGTNGTKRFDNPVLPFNDGVYFASTEKSNIIRGWIFGTTLDSKTQSLLIVNNATNVVIKVCEFQFCNDPFLDVYYHKNNKSWMESEFRVYSSANNCTFEYVSQPFLMDLEGKQGNFKNLREFVFKNIDGYFKIYSKHTPINLGRDLPQGFSALEPLVDLPIGINITRFQTLLALHRSYLTPGDSSSGWTAGAAAYYVGYLQPRTFLLKYNENGTITDAVDCALDPLSETKCTLKSFTVEKGIYQTSNFRVQPTESIVRFPNITNLCPFDEVFNATRFASVYAWNRKRISNCVADYSVLYNFAPFFAFKCYGVSPTKLNDLCFTNVYADSFVIRGNEVRQIAPGQTGNIADYNYKLPDDFTGCVIAWNSNKLDSKVGGNYNYQYRLFRKSNLKPFERDISTEIYQAGNKPCNGVAGFNCYFPLRSYGFRPTYGVGHQPYRVVVLSFELLHAPATVCGPKKSTNLVKNKCVNFNFNGLTGTGVLTESNKKFLPFQQFGRDIADTTDAVRDPQTLEILDITPCSFGGVSVITPGTNTSNQVAVLYQGVNCTEVPVAIHADQLTPTWRVYSTGSNVFQTRAGCLIGAEYVNNSYECDIPIGAGICASYQTQTKSHQQAQSVASQSIIAYTMSLGAENLVAYSNNSIAIPTNFTISVTTEILPVSMTKTSVDCTMYICGDSTECSNLLLQYGSFCTQLKRALTGIAVEQDKNTQEVFAQVKQIYKTPPIKYFGGFNFSQILPDPSKPSKRSFIEDLLFNKVTLADAGFIKQYGDCLGDIAARDLICAQKFNGLTVLPPLLTDEMIAQYTSALLAGTITSGWTFGAGAALQIPFAMQMAYRFNGIGVTQNVLYENQKLIANQFNSAIGKIQDSLSSTASALGKLQDVVNHNAQALNTLVKQLSSKFGAISSVLNDILSRLDPPEAEVQIDRLITGRLQSLQTYVTQQLIRAAEIRASANLAATKMSECVLGQSKRVDFCGKGYHLMSFPQSAPHGVVFLHVTYVPAQEKNFTTAPAICHDGKAHFPREGVFVSNGTHWFVTQRNFYEPQIITTDNTFVSGNCDVVIGIVNNTVYDPLQPELDSFKEELDKYFKNHTSPDVDLGDISGINASVVNIQKEIDRLNEVAKNLNESLIDLQELGKYEQYIKWPWYIWLGFIAGLIAIVMVTIMLCCMTSCCSCLKGCCSCGSCCKFDEDDSEPVLKGVKLHYT

SEQ ID NO: 187 - protein, 1270 aa, synthetic construct; identical to SEQ ID NO: 170
  REGION 1..1270: note = Recombinant SARS-CoV-2 S Polypeptide

SEQ ID NO: 188 - protein, 1257 aa, synthetic construct
  REGION 1..1257: note = Recombinant SARS-CoV-2 S Polypeptide
QCVNLTTRTQLPPAYTNSFTRGVYYPDKVFRSSVLHSTQDLFLPFFSNVTWFHVISGTNGTKRFDNPVLPFNDGVYFASIEKSNIIRGWIFGTTLDSKTQSLLIVNNATNVVIKVCEFQFCNDPFLDHKNNKSWMESEFRVYSSANNCTFEYVSQPFLMDLEGKQGNFKNLREFVFKNIDGYFKIYSKHTPIIVREPEDLPQGFSALEPLVDLPIGINITRFQTLLALHRSYLTPGDSSSGWTAGAAAYYVGYLQPRTFLLKYNENGTITDAVDCALDPLSETKCTLKSFTVEKGIYQTSNFRVQPTESIVRFPNITNLCPFDEVFNATRFASVYAWNRKRISNCVADYSVLYNSAPFFTFKCYGVSPTKLNDLCFTNVYADSFVIRGDEVRQIAPGQTGNIADYNYKLPDDFTGCVIAWNSNKLDSKVSGNYNYLYRLFRKSNLKPFERDISTEIYQAGNKPCNGVAGFNCYFPLRSYSFRPTYGVGHQPYRVVVLSFELLHAPATVCGPKKSTNLVKNKCVNFNFNGLKGTGVLTESNKKFLPFQQFGRDIADTTDAVRDPQTLEILDITPCSFGGVSVITPGTNTSNQVAVLYQGVNCTEVPVAIHADQLTPTWRVYSTGSNVFQTRAGCLIGAEYVNNSYECDIPIGAGICASYQTQTKSHQQAQSVASQSIIAYTMSLGAENSVAYSNNSIAIPTNFTISVTTEILPVSMTKTSVDCTMYICGDSTECSNLLLQYGSFCTQLKRALTGIAVEQDKNTQEVFAQVKQIYKTPPIKYFGGFNFSQILPDPSKPSKRSFIEDLLFNKVTLADAGFIKQYGDCLGDIAARDLICAQKFKGLTVLPPLLTDEMIAQYTSALLAGTITSGWTFGAGAALQIPFAMQMAYRFNGIGVTQNVLYENQKLIANQFNSAIGKIQDSLSSTASALGKLQDVVNHNAQALNTLVKQLSSKFGAISSVLNDIFSRLDPPEAEVQIDRLITGRLQSLQTYVTQQLIRAAEIRASANLAATKMSECVLGQSKRVDFCGKGYHLMSFPQSAPHGVVFLHVTYVPAQEKNFTTAPAICHDGKAHFPREGVFVSNGTHWFVTQRNFYEPQIITTDNTFVSGNCDVVIGIVNNTVYDPLQPELDSFKEELDKYFKNHTSPDVDLGDISGINASVVNIQKEIDRLNEVAKNLNESLIDLQELGKYEQYIKWPWYIWLGFIAGLIAIVMVTIMLCCMTSCCSCLKGCCSCGSCCKFDEDDSEPVLKGVKLHYT

SEQ ID NO: 189 - protein, 1268 aa, synthetic construct
  REGION 1..1268: note = Recombinant SARS-CoV-2 S Polypeptide
MFGFLVLLPLVSSQCVNLITRTQSYTNSFTRGVYYPDKVFRSSVLHSTQDLFLPFFSNVTWFHAISGTNGTKRFDNPVLPFNDGVYFASTEKSNIIRGWIFGTTLDSKTQSLLIVNNATNVVIKVCEFQFCNDPFLDVYYHKNNKSWMESEFRVYSSANNCTFEYVSQPFLMDLEGKQGNFKNLREFVFKNIDGYFKIYSKHTPINLGRDLPQGFSALEPLVDLPIGINITRFQTLLALHRSYLTPGDSSSGWTAGAAAYYVGYLQPRTFLLKYNENGTITDAVDCALDPLSETKCTLKSFTVEKGIYQTSNFRVQPTESIVRFPNITNLCPFDEVFNATRFASVYAWNRKRISNCVADYSVLYNFAPFFAFKCYGVSPTKLNDLCFTNVYADSFVIRGNEVSQIAPGQTGNIADYNYKLPDDFTGCVIAWNSNNLDSKVGGNYNYRYRLFRKSNLKPFERDISTEIYQAGNKPCNGVAGVNCYFPLQSYGFRPTYGVGHQPYRVVVLSFELLHAPATVCGPKKSTNLVKNKCVNFNFNGLTGTGVLTESNKKFLPFQQFGRDIADTTDAVRDPQTLEILDITPCSFGGVSVITPGTNTSNQVAVLYQGVNCTEVPVAIHADQLTPTWRVYSTVSNVFQTRAGCLIGAEYVNNSYECDIPIGAGICASYQTQTKSHQQAQSVASQSIIAYTMSLGAENSVAYSNNSIAIPTNFTISVTTEILPVSMTKTSVDCTMYICGDSTECSNLLLQYGSFCTQLKRALTGIAVEQDKNTQEVFAQVKQIYKTPPIKYFGGFNFSQILPDPSKPSKRSFIEDLLFNKVTLADAGFIKQYGDCLGDIAARDLICAQKFNGLTVLPPLLTDEMIAQYTSALLAGTITSGWTFGAGAALQIPFAMQMAYRFNGIGVTQNVLYENQKLIANQFNSAIGKIQDSLSSTASALGKLQDVVNHNAQALNTLVKQLSSKFGAISSVLNDILSRLDPPEAEVQIDRLITGRLQSLQTYVTQQLIRAAEIRASANLAATKMSECVLGQSKRVDFCGKGYHLMSFPQSAPHGVVFLHVTYVPAQEKNFTTAPAICHDGKAHFPREGVFVSNGTHWFVTQRNFYEPQIITTDNTFVSGNCDVVIGIVNNTVYDPLQPELDSFKEELDKYFKNHTSPDVDLGDISGINASVVNIQKEIDRLNEVAKNLNESLIDLQELGKYEQYIKWPWYIWLGFIAGLIAIVMVTIMLCCMTSCCSCLKGCCSCGSCCKFDEDDSEPVLKGVKLHYT

SEQ ID NO: 190 - protein, 1255 aa, synthetic construct
  REGION 1..1255: note = Recombinant SARS-CoV-2 S Polypeptide
QCVNLITRTQSYTNSFTRGVYYPDKVFRSSVLHSTQDLFLPFFSNVTWFHAISGTNGTKRFDNPVLPFNDGVYFASTEKSNIIRGWIFGTTLDSKTQSLLIVNNATNVVIKVCEFQFCNDPFLDVYYHKNNKSWMESEFRVYSSANNCTFEYVSQPFLMDLEGKQGNFKNLREFVFKNIDGYFKIYSKHTPINLGRDLPQGFSALEPLVDLPIGINITRFQTLLALHRSYLTPGDSSSGWTAGAAAYYVGYLQPRTFLLKYNENGTITDAVDCALDPLSETKCTLKSFTVEKGIYQTSNFRVQPTESIVRFPNITNLCPFDEVFNATRFASVYAWNRKRISNCVADYSVLYNFAPFFAFKCYGVSPTKLNDLCFTNVYADSFVIRGNEVSQIAPGQTGNIADYNYKLPDDFTGCVIAWNSNNLDSKVGGNYNYRYRLFRKSNLKPFERDISTEIYQAGNKPCNGVAGVNCYFPLQSYGFRPTYGVGHQPYRVVVLSFELLHAPATVCGPKKSTNLVKNKCVNFNFNGLTGTGVLTESNKKFLPFQQFGRDIADTTDAVRDPQTLEILDITPCSFGGVSVITPGTNTSNQVAVLYQGVNCTEVPVAIHADQLTPTWRVYSTVSNVFQTRAGCLIGAEYVNNSYECDIPIGAGICASYQTQTKSHQQAQSVASQSIIAYTMSLGAENSVAYSNNSIAIPTNFTISVTTEILPVSMTKTSVDCTMYICGDSTECSNLLLQYGSFCTQLKRALTGIAVEQDKNTQEVFAQVKQIYKTPPIKYFGGFNFSQILPDPSKPSKRSFIEDLLFNKVTLADAGFIKQYGDCLGDIAARDLICAQKFNGLTVLPPLLTDEMIAQYTSALLAGTITSGWTFGAGAALQIPFAMQMAYRFNGIGVTQNVLYENQKLIANQFNSAIGKIQDSLSSTASALGKLQDVVNHNAQALNTLVKQLSSKFGAISSVLNDILSRLDPPEAEVQIDRLITGRLQSLQTYVTQQLIRAAEIRASANLAATKMSECVLGQSKRVDFCGKGYHLMSFPQSAPHGVVFLHVTYVPAQEKNFTTAPAICHDGKAHFPREGVFVSNGTHWFVTQRNFYEPQIITTDNTFVSGNCDVVIGIVNNTVYDPLQPELDSFKEELDKYFKNHTSPDVDLGDISGINASVVNIQKEIDRLNEVAKNLNESLIDLQELGKYEQYIKWPWYIWLGFIAGLIAIVMVTIMLCCMTSCCSCLKGCCSCGSCCKFDEDDSEPVLKGVKLHYT

SEQ ID NO: 191 - protein, 1268 aa, synthetic construct
  REGION 1..1268: note = Recombinant SARS-CoV-2 S Polypeptide
MFVFLVLLPLVSSQCVNLITRTQSYTNSFTRGVYYPDKVFRSSVLHSTQDLFLPFFSNVTWFHAISGTNGTKRFDNPVLPFNDGVYFASTEKSNIIRGWIFGTTLDSKTQSLLIVNNATNVVIKVCEFQFCNDPFLDVYYHKNNKSWMESEFRVYSSANNCTFEYVSQPFLMDLEGKQGNFKNLREFVFKNIDGYFKIYSKHTPINLGRDLPQGFSALEPLVDLPIGINITRFQTLLALHRSYLTPGDSSSGWTAGAAAYYVGYLQPRTFLLKYNENGTITDAVDCALDPLSETKCTLKSFTVEKGIYQTSNFRVQPTESIVRFPNITNLCPFDEVFNATRFASVYAWNRKRISNCVADYSVLYNFAPFFAFKCYGVSPTKLNDLCFTNVYADSFVIRGNEVSQIAPGQTGNIADYNYKLPDDFTGCVIAWNSNKLDSKVGGNYNYRYRLFRKSNLKPFERDISTEIYQAGNKPCNGVAGVNCYFPLQSYGFRPTYGVGHQPYRVVVLSFELLHAPATVCGPKKSTNLVKNKCVNFNFNGLTGTGVLTESNKKFLPFQQFGRDIADTTDAVRDPQTLEILDITPCSFGGVSVITPGTNTSNQVAVLYQGVNCTEVPVAIHADQLTPTWRVYSTGSNVFQTRAGCLIGAEYVNNSYECDIPIGAGICASYQTQTKSHQQAQSVASQSIIAYTMSLGAENSVAYSNNSIAIPTNFTISVTTEILPVSMTKTSVDCTMYICGDSTECSNLLLQYGSFCTQLKRALTGIAVEQDKNTQEVFAQVKQIYKTPPIKYFGGFNFSQILPDPSKPSKRSFIEDLLFNKVTLADAGFIKQYGDCLGDIAARDLICAQKFNGLTVLPPLLTDEMIAQYTSALLAGTITSGWTFGAGAALQIPFAMQMAYRFNGIGVTQNVLYENQKLIANQFNSAIGKIQDSLSSTASALGKLQDVVNHNAQALNTLVKQLSSKFGAISSVLNDILSRLDPPEAEVQIDRLITGRLQSLQTYVTQQLIRAAEIRASANLAATKMSECVLGQSKRVDFCGKGYHLMSFPQSAPHGVVFLHVTYVPAQEKNFTTAPAICHDGKAHFPREGVFVSNGTHWFVTQRNFYEPQIITTDNTFVSGNCDVVIGIVNNTVYDPLQPELDSFKEELDKYFKNHTSPDVDLGDISGINASVVNIQKEIDRLNEVAKNLNESLIDLQELGKYEQYIKWPWYIWLGFIAGLIAIVMVTIMLCCMTSCCSCLKGCCSCGSCCKFDEDDSEPVLKGVKLHYT

SEQ ID NO: 192 - protein, 1255 aa, synthetic construct
  REGION 1..1255: note = Recombinant SARS-CoV-2 S Polypeptide
QCVNLITRTQSYTNSFTRGVYYPDKVFRSSVLHSTQDLFLPFFSNVTWFHAISGTNGTKRFDNPVLPFNDGVYFASTEKSNIIRGWIFGTTLDSKTQSLLIVNNATNVVIKVCEFQFCNDPFLDVYYHKNNKSWMESEFRVYSSANNCTFEYVSQPFLMDLEGKQGNFKNLREFVFKNIDGYFKIYSKHTPINLGRDLPQGFSALEPLVDLPIGINITRFQTLLALHRSYLTPGDSSSGWTAGAAAYYVGYLQPRTFLLKYNENGTITDAVDCALDPLSETKCTLKSFTVEKGIYQTSNFRVQPTESIVRFPNITNLCPFDEVFNATRFASVYAWNRKRISNCVADYSVLYNFAPFFAFKCYGVSPTKLNDLCFTNVYADSFVIRGNEVSQIAPGQTGNIADYNYKLPDDFTGCVIAWNSNKLDSKVGGNYNYRYRLFRKSNLKPFERDISTEIYQAGNKPCNGVAGVNCYFPLQSYGFRPTYGVGHQPYRVVVLSFELLHAPATVCGPKKSTNLVKNKCVNFNFNGLTGTGVLTESNKKFLPFQQFGRDIADTTDAVRDPQTLEILDITPCSFGGVSVITPGTNTSNQVAVLYQGVNCTEVPVAIHADQLTPTWRVYSTGSNVFQTRAGCLIGAEYVNNSYECDIPIGAGICASYQTQTKSHQQAQSVASQSIIAYTMSLGAENSVAYSNNSIAIPTNFTISVTTEILPVSMTKTSVDCTMYICGDSTECSNLLLQYGSFCTQLKRALTGIAVEQDKNTQEVFAQVKQIYKTPPIKYFGGFNFSQILPDPSKPSKRSFIEDLLFNKVTLADAGFIKQYGDCLGDIAARDLICAQKFNGLTVLPPLLTDEMIAQYTSALLAGTITSGWTFGAGAALQIPFAMQMAYRFNGIGVTQNVLYENQKLIANQFNSAIGKIQDSLSSTASALGKLQDVVNHNAQALNTLVKQLSSKFGAISSVLNDILSRLDPPEAEVQIDRLITGRLQSLQTYVTQQLIRAAEIRASANLAATKMSECVLGQSKRVDFCGKGYHLMSFPQSAPHGVVFLHVTYVPAQEKNFTTAPAICHDGKAHFPREGVFVSNGTHWFVTQRNFYEPQIITTDNTFVSGNCDVVIGIVNNTVYDPLQPELDSFKEELDKYFKNHTSPDVDLGDISGINASVVNIQKEIDRLNEVAKNLNESLIDLQELGKYEQYIKWPWYIWLGFIAGLIAIVMVTIMLCCMTSCCSCLKGCCSCGSCCKFDEDDSEPVLKGVKLHYT

SEQ ID NO: 193 - protein, 13 aa, synthetic construct
  REGION 1..13: note = signal peptide
MFGFLVLLPLVSS

SEQ ID NO: 194 - protein, 1270 aa, synthetic construct
  REGION 1..1270: note = Recombinant SARS-CoV-2 S Polypeptide
MFVFLVLLPLVSSQCVNLITRTQSYTNSFTRGVYYPDKVFRSSVLHSTQDLFLPFFSNVTWFHAIHVSGTNGTKRFDNPVLPFNDGVYFASTEKSNIIRGWIFGTTLDSKTQSLLIVNNATNVVIKVCEFQFCNDPFLDVYYHKNNKSWMESEFRVYSSANNCTFEYVSQPFLMDLEGKQGNFKNLREFVFKNIDGYFKIYSKHTPINLGRDLPQGFSALEPLVDLPIGINITRFQTLLALHRSYLTPGDSSSGWTAGAAAYYVGYLQPRTFLLKYNENGTITDAVDCALDPLSETKCTLKSFTVEKGIYQTSNFRVQPTESIVRFPNITNLCPFDEVFNATRFASVYAWNRKRISNCVADYSVLYNFAPFFAFKCYGVSPTKLNDLCFTNVYADSFVIRGNEVSQIAPGQTGNIADYNYKLPDDFTGCVIAWNSNKLDSKVGGNYNYLYRLFRKSNLKPFERDISTEIYQAGNKPCNGVAGFNCYFPLRSYGFRPTYGVGHQPYRVVVLSFELLHAPATVCGPKKSTNLVKNKCVNFNFNGLTGTGVLTESNKKFLPFQQFGRDIADTTDAVRDPQTLEILDITPCSFGGVSVITPGTNTSNQVAVLYQGVNCTEVPVAIHADQLTPTWRVYSTGSNVFQTRAGCLIGAEYVNNSYECDIPIGAGICASYQTQTKSHQQAQSVASQSIIAYTMSLGAENSVAYSNNSIAIPTNFTISVTTEILPVSMTKTSVDCTMYICGDSTECSNLLLQYGSFCTQLKRALTGIAVEQDKNTQEVFAQVKQIYKTPPIKYFGGFNFSQILPDPSKPSKRSFIEDLLFNKVTLADAGFIKQYGDCLGDIAARDLICAQKFNGLTVLPPLLTDEMIAQYTSALLAGTITSGWTFGAGAALQIPFAMQMAYRFNGIGVTQNVLYENQKLIANQFNSAIGKIQDSLSSTASALGKLQDVVNHNAQALNTLVKQLSSKFGAISSVLNDILSRLDPPEAEVQIDRLITGRLQSLQTYVTQQLIRAAEIRASANLAATKMSECVLGQSKRVDFCGKGYHLMSFPQSAPHGVVFLHVTYVPAQEKNFTTAPAICHDGKAHFPREGVFVSNGTHWFVTQRNFYEPQIITTDNTFVSGNCDVVIGIVNNTVYDPLQPELDSFKEELDKYFKNHTSPDVDLGDISGINASVVNIQKEIDRLNEVAKNLNESLIDLQELGKYEQYIKWPWYIWLGFIAGLIAIVMVTIMLCCMTSCCSCLKGCCSCGSCCKFDEDDSEPVLKGVKLHYT

SEQ ID NO: 195 - protein, 1257 aa, synthetic construct
  REGION 1..1257: note = Recombinant SARS-CoV-2 S Polypeptide
QCVNLITRTQSYTNSFTRGVYYPDKVFRSSVLHSTQDLFLPFFSNVTWFHAIHVSGTNGTKRFDNPVLPFNDGVYFASTEKSNIIRGWIFGTTLDSKTQSLLIVNNATNVVIKVCEFQFCNDPFLDVYYHKNNKSWMESEFRVYSSANNCTFEYVSQPFLMDLEGKQGNFKNLREFVFKNIDGYFKIYSKHTPINLGRDLPQGFSALEPLVDLPIGINITRFQTLLALHRSYLTPGDSSSGWTAGAAAYYVGYLQPRTFLLKYNENGTITDAVDCALDPLSETKCTLKSFTVEKGIYQTSNFRVQPTESIVRFPNITNLCPFDEVFNATRFASVYAWNRKRISNCVADYSVLYNFAPFFAFKCYGVSPTKLNDLCFTNVYADSFVIRGNEVSQIAPGQTGNIADYNYKLPDDFTGCVIAWNSNKLDSKVGGNYNYLYRLFRKSNLKPFERDISTEIYQAGNKPCNGVAGFNCYFPLRSYGFRPTYGVGHQPYRVVVLSFELLHAPATVCGPKKSTNLVKNKCVNFNFNGLTGTGVLTESNKKFLPFQQFGRDIADTTDAVRDPQTLEILDITPCSFGGVSVITPGTNTSNQVAVLYQGVNCTEVPVAIHADQLTPTWRVYSTGSNVFQTRAGCLIGAEYVNNSYECDIPIGAGICASYQTQTKSHQQAQSVASQSIIAYTMSLGAENSVAYSNNSIAIPTNFTISVTTEILPVSMTKTSVDCTMYICGDSTECSNLLLQYGSFCTQLKRALTGIAVEQDKNTQEVFAQVKQIYKTPPIKYFGGFNFSQILPDPSKPSKRSFIEDLLFNKVTLADAGFIKQYGDCLGDIAARDLICAQKFNGLTVLPPLLTDEMIAQYTSALLAGTITSGWTFGAGAALQIPFAMQMAYRFNGIGVTQNVLYENQKLIANQFNSAIGKIQDSLSSTASALGKLQDVVNHNAQALNTLVKQLSSKFGAISSVLNDILSRLDPPEAEVQIDRLITGRLQSLQTYVTQQLIRAAEIRASANLAATKMSECVLGQSKRVDFCGKGYHLMSFPQSAPHGVVFLHVTYVPAQEKNFTTAPAICHDGKAHFPREGVFVSNGTHWFVTQRNFYEPQIITTDNTFVSGNCDVVIGIVNNTVYDPLQPELDSFKEELDKYFKNHTSPDVDLGDISGINASVVNIQKEIDRLNEVAKNLNESLIDLQELGKYEQYIKWPWYIWLGFIAGLIAIVMVTIMLCCMTSCCSCLKGCCSCGSCCKFDEDDSEPVLKGVKLHYT

SEQ ID NO: 196 - DNA, 3813 bp, synthetic construct
  source 1..3813: mol_type = other DNA
atgttcgtcttcctggtgctgctgcccctggtgtccagccagtgcgtgaacctgaccactaggactcagctgcctcccgcttacaccaactcattcactcgcggtgtgtactaccctgacaaggtcttccgttcttcagtgctgcactcaactcaggacctgttcctgcccttcttctccaacgtcacctggttccacgtcatctccggcaccaacggcactaagcgcttcgacaacccagtgctgcctttcaacgacggtgtctacttcgcttcaattgagaagtccaacatcatccgtggatggatcttcggcaccactctggacagcaagactcagtctctgctgatcgtcaacaacgccaccaacgtggtcatcaaggtctgcgaattccagttctgcaacgacccattcctggaccacaagaacaacaagtcatggatggagtccgaattccgcgtctactccagcgctaacaactgcactttcgagtacgtgtcccagcctttcctgatggacctggaaggaaagcagggtaacttcaagaacctgagggagttcgtgttcaagaacatcgacggatacttcaagatttacagcaagcacaccccaatcattgtgcgcgagccggaggacctgcctcagggtttctctgctctggagccactggtggacctgcctatcggcatcaacatcacccgcttccagactctgctggctctgcaccgttcctacctgactccaggcgactcatcttctggatggactgctggagctgctgcttactacgtgggctacctgcagcctcgcaccttcctgctgaagtacaacgaaaacggaaccatcactgacgccgtcgactgcgctctggaccctctgtcagaaaccaagtgcactctgaagtccttcaccgtggagaagggcatctaccagacttcaaacttcagggtgcagcccaccgaatccatcgtcagattccctaacatcactaacctgtgccccttcgacgaggtcttcaacgccacccgcttcgcttccgtgtacgcctggaacaggaagagaatctcaaactgcgtcgctgactactccgtgctgtacaaccttgccccgttctttaccttcaagtgctacggcgtgtcaccaactaagctgaacgacctgtgcttcaccaacgtctacgccgactccttcgtgatcaggggagacgaggtcagacagatcgctcctggccagactggaaatatcgccgactacaactacaagctgcccgacgacttcaccggttgcgtcatcgcttggaacagcaacaaactggactctaaagtgagtggcaactacaactacctgtaccgcctgttccgtaagtcaaacctgaagccattcgagagggacatcagcactgaaatctaccaggccggaaataaaccttgcaacggtgtcgcgggcttcaactgctacttccccctgaggtcctactctttccgaccaacttatggtgtgggccaccagccttacagagtggtcgtgctgagcttcgaactgctccacgctcctgctactgtgtgcggtccaaagaagtctaccaacctggtcaagaacaagtgcgtgaacttcaacttcaacggcctgaaaggaactggtgtcctgaccgagagcaacaagaagttcctgcccttccagcagttcggaagggacatcgctgacaccactgacgctgtgcgcgaccctcagaccctggaaatcctggacatcactccatgctcattcggaggtgtctccgtgatcacccctggcaccaacacttctaaccaggtcgctgtgctgtaccagggcgtcaactgcaccgaggtccctgtggccatccacgctgaccagctgacccccacttggcgcgtgtactccaccggcagcaacgtgttccagactcgtgctggttgcctgatcggcgccgagtacgtgaacaacagctacgaatgcgacatccccatcggcgctggaatctgcgcctcttaccagacccagactaagagccaccagcaggctcagtctgtggcctctcagtcaatcatcgcttacaccatgtcactgggcgctgaaaactccgtggcctactctaacaactcaatcgccatccccaccaacttcactatcagcgtgaccactgagatcctgccagtcagcatgaccaagacttctgtggactgcactatgtacatctgcggagacagcaccgaatgctctaacctgctgctgcagtacggctctttctgcacccagctgaagcgtgctctgactggaatcgccgtggagcaggacaagaacactcaggaagtcttcgctcaggtgaagcaaatctacaagaccccacctatcaagtacttcggcggattcaacttctcccagatcctgcctgacccctccaagccaagcaagcgctctttcatcgaggacctgctgttcaacaaggtcactctggccgacgctggattcatcaagcagtacggagactgcctgggtgacatcgccgctcgtgacctgatctgcgctcagaagttcaagggtctgaccgtgctgcccccactgctgactgacgaaatgatcgcccagtacactagcgccctgctggctggaaccatcacttctggttggaccttcggtgctggcgccgctctgcagatccctttcgctatgcagatggcctaccgtttcaacggaatcggtgtcacccagaacgtgctgtacgagaaccagaagctgatcgctaaccagttcaactcagccatcggaaagatccaggacagcctgagctctactgcctctgctctgggcaagctgcaggacgtcgtgaaccataacgcccaggctctgaacaccctggtcaagcagctgtcatccaagttcggtgctatcagctctgtgctgaacgacatcttctcccgcctggaccctcccgaggccgaagtgcagatcgaccgcctgatcactggccgtctgcagtcactgcagacctacgtgactcagcagctgatcagggccgctgaaatcagagcctccgctaacctggccgctaccaagatgagcgagtgcgtcctgggtcaatctaagcgtgtggacttctgcggcaagggataccacctgatgtcattccctcagtctgctccccacggtgtggtgttcctgcacgtcacctacgtgccagcccaggagaagaacttcaccactgcccctgctatctgccacgacggcaaggctcacttccccagggaaggtgtcttcgtgagcaacggcacccactggttcgtcactcagagaaacttctacgagccacagatcatcaccactgacaacactttcgtgtctggaaactgcgacgtggtcatcggtatcgtcaacaacaccgtgtacgaccccctgcagccagagctggactcattcaaggaggaactggacaagtacttcaagaaccacacctcccctgacgtcgacctgggcgacatctcaggaatcaacgcttccgtcgtgaacatccagaaggagatcgaccgcctgaacgaagtggccaagaacctgaacgaaagcctgatcgacctgcaggagctgggcaagtacgaacagtacatcaagtggccttggtacatctggctgggtttcatcgctggcctcatcgctatcgtgatggtgaccatcatgctgtgctgcatgacttcatgctgctcctgcctgaagggctgctgcagctgcggatcttgctgcaagttcgacgaggacgactctgaacccgtcctgaagggcgtgaagctgcactacacctaa

SEQ ID NO: 197 - DNA, 3813 bp, synthetic construct
  source 1..3813: mol_type = other DNA
atgttcgtcttcctggtgctgctgcctctggtctccagccagtgcgtgaacctgatcaccaggactcagtcctacaccaacagcttcactagaggtgtgtactaccctgacaaggtcttccgctcttcagtgctgcactctactcaggacctgttcctgcccttcttctcaaacgtcacctggttccacgccatccacgtgtccggcaccaacggcactaagagattcgacaacccagtgctgcctttcaacgacggcgtctacttcgcttctaccgagaagtcaaacatcatccgcggatggatcttcggcaccactctggactccaagactcagagcctgctgatcgtcaacaacgccaccaacgtggtcatcaaggtgtgcgaattccagttctgcaacgacccattcctggacgtgtactaccacaagaacaacaagtcttggatggagtcagaattcagagtctactccagcgctaacaactgcactttcgagtacgtgtctcagcctttcctgatggacctggaaggaaagcagggtaacttcaagaacctgcgtgagttcgtcttcaagaacatcgacggttacttcaagatttactctaagcacaccccaatcaacctgggtagggacctgcctcagggcttctcagctctggagccactggtggacctgcctatcggcatcaacatcaccaggttccagactctgctggctctgcacagaagctacctgactccaggagactcatcttctggatggactgctggagctgctgcttactacgtgggttacctgcagcctcgcaccttcctgctgaagtacaacgaaaacggcaccatcactgacgccgtcgactgcgctctggaccctctgtctgaaaccaagtgcactctgaagtcattcaccgtggagaagggcatctaccagacttccaacttccgcgtgcagcccaccgaaagcatcgtccgtttccctaacatcactaacctgtgccccttcgacgaggtcttcaacgccacccgtttcgcttctgtgtacgcctggaaccgcaagcgtatctctaactgcgtcgccgactactcagtgctgtacaacttcgctcccttcttcgccttcaagtgctacggagtgtcaccaactaagctgaacgacctgtgcttcaccaacgtctacgctgactctttcgtgatcaggggtaacgaggtctcacagatcgctccaggccagactggaaacatcgccgactacaactacaagctgcctgacgacttcaccggttgcgtcatcgcttggaactccaacaagctggacagcaaagtgggtggcaactacaactacctgtacaggctgttcagaaagtccaacctgaagcccttcgagcgtgacatcagcactgaaatctaccaggctggtaacaagccatgcaacggtgtcgccggcttcaactgctacttccccctgcgctcctacggcttccgtccaacctacggtgtgggccaccagccttacagggtggtcgtgctgtccttcgaactcctccacgctccagctactgtgtgcggaccaaagaagagcaccaacctggtcaagaacaagtgcgtgaacttcaacttcaacggtctgaccggaactggtgtcctgaccgagtctaacaagaagttcctgcccttccagcagttcggtcgtgacatcgctgacactaccgacgccgtgagggacccccagaccctggaaatcctggacatcactccatgctctttcggaggtgtctcagtgatcactccaggaaccaacacttcaaaccaggtcgctgtgctgtaccagggtgtcaactgcaccgaagtccctgtggccatccacgctgaccagctgacccccacttggagagtgtacagcaccggctctaacgtcttccagactcgcgctggttgcctgatcggcgccgagtacgtgaacaactcttacgaatgcgacatccccatcggcgctggaatctgcgcctcataccagacccagactaagtcccaccagcaggctcagagcgtcgcctcacagtccatcatcgcttacaccatgtctctgggcgctgaaaactcagtggcctactcaaacaactccatcgccatccctaccaacttcactatctccgtgaccactgagatcctgcccgtctccatgaccaagactagcgtggactgcactatgtacatctgcggagactccaccgaatgcagcaacctgctgctgcagtacggtagcttctgcacccagctgaagcgtgctctgactggcatcgccgtggagcaggacaagaacactcaggaagtcttcgctcaggtgaagcaaatctacaagacccctcccatcaagtacttcggcggattcaacttctcccagatcctgcctgaccccagcaagccatctaagagatcattcatcgaggacctgctgttcaacaaggtcactctggccgacgctggtttcatcaagcagtacggagactgcctgggtgacatcgccgctcgcgacctgatctgcgctcagaagttcaacggcctgaccgtgctgccacctctgctgactgacgaaatgatcgcccagtacacttccgccctgctggctggaaccatcacttctggttggaccttcggtgctggtgctgctctgcagatccctttcgctatgcagatggcctacaggttcaacggaatcggtgtcacccagaacgtgctgtacgagaaccagaagctgatcgctaaccagttcaactccgccatcggcaagatccaggactccctgagctctactgccagcgctctgggaaagctgcaggacgtcgtgaaccacaacgcccaggctctgaacaccctggtcaagcagctgtcatccaagttcggagctatcagctctgtgctgaacgacatcctctcccgcctggaccctcctgaggctgaagtccagatcgacaggctgatcactggtagactgcagtctctgcagacctacgtgactcagcagctgatccgcgccgctgaaatccgtgcctcagctaacctggccgctaccaagatgtctgagtgcgtcctgggccagagcaagagggtggacttctgcggcaagggataccacctgatgtctttccctcagtcagctccccacggagtcgtgttcctgcacgtcacctacgtgccagcccaggagaagaacttcaccactgcccctgctatctgccacgacggcaaggctcacttcccccgtgaaggagtcttcgtgtccaacggcacccactggttcgtcactcagaggaacttctacgagccacagatcatcaccactgacaacactttcgtgagcggcaactgcgacgtggtcatcggtatcgtcaacaacaccgtgtacgaccccctgcagccagagctggactccttcaaggaagagctggacaagtacttcaagaaccacaccagcccagacgtcgacctgggcgacatctctggaatcaacgcttcagtcgtgaacatccagaaggagatcgaccgtctgaacgaagtggccaagaacctgaacgaatctctgatcgacctgcaggagctgggaaagtacgaacagtacatcaagtggccttggtacatctggctgggtttcatcgctggcctcatcgctatcgtgatggtgaccatcatgctgtgctgcatgacttcctgctgcagctgcctgaagggctgctgctcttgcggatcatgctgcaagttcgacgaggacgactcagaacccgtcctgaagggcgtgaagctgcactacacctaa

SEQ ID NO: 198 - DNA, 3807 bp, synthetic construct
  source 1..3807: mol_type = other DNA
atgttcgtcttcctggtgctgctgcctctggtctccagccagtgcgtgaacctgatcaccaggactcagtcctacaccaacagcttcactagaggtgtgtactaccctgacaaggtcttccgctcttcagtgctgcactctactcaggacctgttcctgcccttcttctcaaacgtcacctggttccacgccatctccggcaccaacggcactaagagattcgacaacccagtgctgcctttcaacgacggcgtctacttcgcttctaccgagaagtcaaacatcatccgcggatggatcttcggcaccactctggactccaagactcagagcctgctgatcgtcaacaacgccaccaacgtggtcatcaaggtgtgcgaattccagttctgcaacgacccattcctggacgtgtactaccacaagaacaacaagtcttggatggagtcagaattcagagtctactccagcgctaacaactgcactttcgagtacgtgtctcagcctttcctgatggacctggaaggaaagcagggtaacttcaagaacctgcgtgagttcgtcttcaagaacatcgacggttacttcaagatttactctaagcacaccccaatcaacctgggtagggacctgcctcagggcttctcagctctggagccactggtggacctgcctatcggcatcaacatcaccaggttccagactctgctggctctgcacagaagctacctgactccaggagactcatcttctggatggactgctggagctgctgcttactacgtgggttacctgcagcctcgcaccttcctgctgaagtacaacgaaaacggcaccatcactgacgccgtcgactgcgctctggaccctctgtctgaaaccaagtgcactctgaagtcattcaccgtggagaagggcatctaccagacttccaacttccgcgtgcagcccaccgaaagcatcgtccgtttccctaacatcactaacctgtgccccttcgacgaggtcttcaacgccacccgtttcgcttctgtgtacgcctggaaccgcaagcgtatctctaactgcgtcgccgactactcagtgctgtacaacttcgctcccttcttcgccttcaagtgctacggagtgtcaccaactaagctgaacgacctgtgcttcaccaacgtctacgctgactctttcgtgatcaggggtaacgaggtctcacagatcgctccaggccagactggaaacatcgccgactacaactacaagctgcctgacgacttcaccggttgcgtcatcgcttggaactccaacaagctggacagcaaagtgggtggcaactacaactaccgttacaggctgttcagaaagtccaacctgaagcccttcgagcgtgacatcagcactgaaatctaccaggctggtaacaagccatgcaacggtgtcgccggcgtcaactgctacttccccctgcagtcctacggcttccgtccaacctacggtgtgggccaccagccttacagggtggtcgtgctgtccttcgaactcctccacgctccagctactgtgtgcggaccaaagaagagcaccaacctggtcaagaacaagtgcgtgaacttcaacttcaacggtctgaccggaactggtgtcctgaccgagtctaacaagaagttcctgcccttccagcagttcggtcgtgacatcgctgacactaccgacgccgtgagggacccccagaccctggaaatcctggacatcactccatgctctttcggaggtgtctcagtgatcactccaggaaccaacacttcaaaccaggtcgctgtgctgtaccagggtgtcaactgcaccgaagtccctgtggccatccacgctgaccagctgacccccacttggagagtgtacagcaccggctctaacgtcttccagactcgcgctggttgcctgatcggcgccgagtacgtgaacaactcttacgaatgcgacatccccatcggcgctggaatctgcgcctcataccagacccagactaagtcccaccagcaggctcagagcgtcgcctcacagtccatcatcgcttacaccatgtctctgggcgctgaaaactcagtggcctactcaaacaactccatcgccatccctaccaacttcactatctccgtgaccactgagatcctgcccgtctccatgaccaagactagcgtggactgcactatgtacatctgcggagactccaccgaatgcagcaacctgctgctgcagtacggtagcttctgcacccagctgaagcgtgctctgactggcatcgccgtggagcaggacaagaacactcaggaagtcttcgctcaggtgaagcaaatctacaagacccctcccatcaagtacttcggcggattcaacttctcccagatcctgcctgaccccagcaagccatctaagagatcattcatcgaggacctgctgttcaacaaggtcactctggccgacgctggtttcatcaagcagtacggagactgcctgggtgacatcgccgctcgcgacctgatctgcgctcagaagttcaacggcctgaccgtgctgccacctctgctgactgacgaaatgatcgcccagtacacttccgccctgctggctggaaccatcacttctggttggaccttcggtgctggtgctgctctgcagatccctttcgctatgcagatggcctacaggttcaacggaatcggtgtcacccagaacgtgctgtacgagaaccagaagctgatcgctaaccagttcaactccgccatcggcaagatccaggactccctgagctctactgccagcgctctgggaaagctgcaggacgtcgtgaaccacaacgcccaggctctgaacaccctggtcaagcagctgtcatccaagttcggagctatcagctctgtgctgaacgacatcctctcccgcctggaccctcctgaggctgaagtccagatcgacaggctgatcactggtagactgcagtctctgcagacctacgtgactcagcagctgatccgcgccgctgaaatccgtgcctcagctaacctggccgctaccaagatgtctgagtgcgtcctgggccagagcaagagggtggacttctgcggcaagggataccacctgatgtctttccctcagtcagctccccacggagtcgtgttcctgcacgtcacctacgtgccagcccaggagaagaacttcaccactgcccctgctatctgccacgacggcaaggctcacttcccccgtgaaggagtcttcgtgtccaacggcacccactggttcgtcactcagaggaacttctacgagccacagatcatcaccactgacaacactttcgtgagcggcaactgcgacgtggtcatcggtatcgtcaacaacaccgtgtacgaccccctgcagccagagctggactccttcaaggaagagctggacaagtacttcaagaaccacaccagcccagacgtcgacctgggcgacatctctggaatcaacgcttcagtcgtgaacatccagaaggagatcgaccgtctgaacgaagtggccaagaacctgaacgaatctctgatcgacctgcaggagctgggaaagtacgaacagtacatcaagtggccttggtacatctggctgggtttcatcgctggcctcatcgctatcgtgatggtgaccatcatgctgtgctgcatgacttcctgctgcagctgcctgaagggctgctgctcttgcggatcatgctgcaagttcgacgaggacgactcagaacccgtcctgaagggcgtgaagctgcactacacctaa

SEQ ID NO: 199 - DNA, 3807 bp, synthetic construct
  source 1..3807: mol_type = other DNA
atgttcggtttcctggtgctgctgcctctggtctccagccagtgcgtgaacctgatcaccaggactcagtcctacaccaacagcttcactagaggtgtgtactaccctgacaaggtcttccgctcttcagtgctgcactctactcaggacctgttcctgcccttcttctcaaacgtcacctggttccacgccatctccggcaccaacggcactaagagattcgacaacccagtgctgcctttcaacgacggcgtctacttcgcttctaccgagaagtcaaacatcatccgcggatggatcttcggcaccactctggactccaagactcagagcctgctgatcgtcaacaacgccaccaacgtggtcatcaaggtgtgcgaattccagttctgcaacgacccattcctggacgtgtactaccacaagaacaacaagtcttggatggagtcagaattcagagtctactccagcgctaacaactgcactttcgagtacgtgtctcagcctttcctgatggacctggaaggaaagcagggtaacttcaagaacctgcgtgagttcgtcttcaagaacatcgacggttacttcaagatttactctaagcacaccccaatcaacctgggtagggacctgcctcagggcttctcagctctggagccactggtggacctgcctatcggcatcaacatcaccaggttccagactctgctggctctgcacagaagctacctgactccaggagactcatcttctggatggactgctggagctgctgcttactacgtgggttacctgcagcctcgcaccttcctgctgaagtacaacgaaaacggcaccatcactgacgccgtcgactgcgctctggaccctctgtctgaaaccaagtgcactctgaagtcattcaccgtggagaagggcatctaccagacttccaacttccgcgtgcagcccaccgaaagcatcgtccgtttccctaacatcactaacctgtgccccttcgacgaggtcttcaacgccacccgtttcgcttctgtgtacgcctggaaccgcaagcgtatctctaactgcgtcgccgactactcagtgctgtacaacttcgctcccttcttcgccttcaagtgctacggagtgtcaccaactaagctgaacgacctgtgcttcaccaacgtctacgctgactctttcgtgatcaggggtaacgaggtctcacagatcgctccaggccagactggaaacatcgccgactacaactacaagctgcctgacgacttcaccggttgcgtcatcgcttggaactccaacaacctggacagcaaagtgggtggcaactacaactaccgttacaggctgttcagaaagtccaacctgaagcccttcgagcgtgacatcagcactgaaatctaccaggctggtaacaagccatgcaacggtgtcgccggcgtcaactgctacttccccctgcagtcctacggcttccgtccaacctacggtgtgggccaccagccttacagggtggtcgtgctgtccttcgaactcctccacgctccagctactgtgtgcggaccaaagaagagcaccaacctggtcaagaacaagtgcgtgaacttcaacttcaacggtctgaccggaactggtgtcctgaccgagtctaacaagaagttcctgcccttccagcagttcggtcgtgacatcgctgacactaccgacgccgtgagggacccccagaccctggaaatcctggacatcactccatgctctttcggaggtgtctcagtgatcactccaggaaccaacacttcaaaccaggtcgctgtgctgtaccagggtgtcaactgcaccgaagtccctgtggccatccacgctgaccagctgacccccacttggagagtgtacagcaccgtgtctaacgtcttccagactcgcgctggttgcctgatcggcgccgagtacgtgaacaactcttacgaatgcgacatccccatcggcgctggaatctgcgcctcataccagacccagactaagtcccaccagcaggctcagagcgtcgcctcacagtccatcatcgcttacaccatgtctctgggcgctgaaaactcagtggcctactcaaacaactccatcgccatccctaccaacttcactatctccgtgaccactgagatcctgcccgtctccatgaccaagactagcgtggactgcactatgtacatctgcggagactccaccgaatgcagcaacctgctgctgcagtacggtagcttctgcacccagctgaagcgtgctctgactggcatcgccgtggagcaggacaagaacactcaggaagtcttcgctcaggtgaagcaaatctacaagacccctcccatcaagtacttcggcggattcaacttctcccagatcctgcctgaccccagcaagccatctaagagatcattcatcgaggacctgctgttcaacaaggtcactctggccgacgctggtttcatcaagcagtacggagactgcctgggtgacatcgccgctcgcgacctgatctgcgctcagaagttcaacggcctgaccgtgctgccacctctgctgactgacgaaatgatcgcccagtacacttccgccctgctggctggaaccatcacttctggttggaccttcggtgctggtgctgctctgcagatccctttcgctatgcagatggcctacaggttcaacggaatcggtgtcacccagaacgtgctgtacgagaaccagaagctgatcgctaaccagttcaactccgccatcggcaagatccaggactccctgagctctactgccagcgctctgggaaagctgcaggacgtcgtgaaccacaacgcccaggctctgaacaccctggtcaagcagctgtcatccaagttcggagctatcagctctgtgctgaacgacatcctctcccgcctggaccctcctgaggctgaagtccagatcgacaggctgatcactggtagactgcagtctctgcagacctacgtgactcagcagctgatccgcgccgctgaaatccgtgcctcagctaacctggccgctaccaagatgtctgagtgcgtcctgggccagagcaagagggtggacttctgcggcaagggataccacctgatgtctttccctcagtcagctccccacggagtcgtgttcctgcacgtcacctacgtgccagcccaggagaagaacttcaccactgcccctgctatctgccacgacggcaaggctcacttcccccgtgaaggagtcttcgtgtccaacggcacccactggttcgtcactcagaggaacttctacgagccacagatcatcaccactgacaacactttcgtgagcggcaactgcgacgtggtcatcggtatcgtcaacaacaccgtgtacgaccccctgcagccagagctggactccttcaaggaagagctggacaagtacttcaagaaccacaccagcccagacgtcgacctgggcgacatctctggaatcaacgcttcagtcgtgaacatccagaaggagatcgaccgtctgaacgaagtggccaagaacctgaacgaatctctgatcgacctgcaggagctgggaaagtacgaacagtacatcaagtggccttggtacatctggctgggtttcatcgctggcctcatcgctatcgtgatggtgaccatcatgctgtgctgcatgacttcctgctgcagctgcctgaagggctgctgctcttgcggatcatgctgcaagttcgacgaggacgactcagaacccgtcctgaagggcgtgaagctgcactacacctaa

SEQ ID NO: 200 - protein, 1270 aa, synthetic construct
MFVFLVLLPLVSSQCVNLITRTQSYTNSFTRGVYYPDKVFRSSVLHSTQDLFLPFFSNVTWFHAIHVSGTNGTKRFDNPVLPFNDGVYFASTEKSNIIRGWIFGTTLDSKTQSLLIVNNATNVVIKVCEFQFCNDPFLDVYYHKNNKSWMESEFRVYSSANNCTFEYVSQPFLMDLEGKQGNFKNLREFVFKNIDGYFKIYSKHTPINLGRDLPQGFSALEPLVDLPIGINITRFQTLLALHRSYLTPGDSSSGWTAGAAAYYVGYLQPRTFLLKYNENGTITDAVDCALDPLSETKCTLKSFTVEKGIYQTSNFRVQPTESIVRFPNITNLCPFDEVFNATRFASVYAWNRKRISNCVADYSVLYNFAPFFAFKCYGVSPTKLNDLCFTNVYADSFVIRGNEVSQIAPGQTGNIADYNYKLPDDFTGCVIAWNSNKLDSKVGGNYNYQYRLFRKSNLKPFERDISTEIYQAGNKPCNGVAGFNCYFPLRSYGFRPTYGVGHQPYRVVVLSFELLHAPATVCGPKKSTNLVKNKCVNFNFNGLTGTGVLTESNKKFLPFQQFGRDIADTTDAVRDPQTLEILDITPCSFGGVSVITPGTNTSNQVAVLYQGVNCTEVPVAIHADQLTPTWRVYSTGSNVFQTRAGCLIGAEYVNNSYECDIPIGAGICASYQTQTKSHQQAQSVASQSIIAYTMSLGAENLVAYSNNSIAIPTNFTISVTTEILPVSMTKTSVDCTMYICGDSTECSNLLLQYGSFCTQLKRALTGIAVEQDKNTQEVFAQVKQIYKTPPIKYFGGFNFSQILPDPSKPSKRSFIEDLLFNKVTLADAGFIKQYGDCLGDIAARDLICAQKFNGLTVLPPLLTDEMIAQYTSALLAGTITSGWTFGAGAALQIPFAMQMAYRFNGIGVTQNVLYENQKLIANQFNSAIGKIQDSLSSTASALGKLQDVVNHNAQALNTLVKQLSSKFGAISSVLNDILSRLDPPEAEVQIDRLITGRLQSLQTYVTQQLIRAAEIRASANLAATKMSECVLGQSKRVDFCGKGYHLMSFPQSAPHGVVFLHVTYVPAQEKNFTTAPAICHDGKAHFPREGVFVSNGTHWFVTQRNFYEPQIITTDNTFVSGNCDVVIGIVNNTVYDPLQPELDSFKEELDKYFKNHTSPDVDLGDISGINASVVNIQKEIDRLNEVAKNLNESLIDLQELGKYEQYIKWPWYIWLGFIAGLIAIVMVTIMLCCMTSCCSCLKGCCSCGSCCKFDEDDSEPVLKGVKLHYT

SEQ ID NO: 201 - DNA, 3813 bp, synthetic construct
  source 1..3813: mol_type = other DNA
atgttcgtcttcctggtgctgctgcctctggtctccagccagtgcgtgaacctgatcaccaggactcagtcctacaccaacagcttcactagaggtgtgtactaccctgacaaggtcttccgctcttcagtgctgcactctactcaggacctgttcctgcccttcttctcaaacgtcacctggttccacgccatccacgtgtccggcaccaacggcactaagagattcgacaacccagtgctgcctttcaacgacggcgtctacttcgcttctaccgagaagtcaaacatcatccgcggatggatcttcggcaccactctggactccaagactcagagcctgctgatcgtcaacaacgccaccaacgtggtcatcaaggtgtgcgaattccagttctgcaacgacccattcctggacgtgtactaccacaagaacaacaagtcttggatggagtcagaattcagagtctactccagcgctaacaactgcactttcgagtacgtgtctcagcctttcctgatggacctggaaggaaagcagggtaacttcaagaacctgcgtgagttcgtcttcaagaacatcgacggttacttcaagatttactctaagcacaccccaatcaacctgggtagggacctgcctcagggcttctcagctctggagccactggtggacctgcctatcggcatcaacatcaccaggttccagactctgctggctctgcacagaagctacctgactccaggagactcatcttctggatggactgctggagctgctgcttactacgtgggttacctgcagcctcgcaccttcctgctgaagtacaacgaaaacggcaccatcactgacgccgtcgactgcgctctggaccctctgtctgaaaccaagtgcactctgaagtcattcaccgtggagaagggcatctaccagacttccaacttccgcgtgcagcccaccgaaagcatcgtccgtttccctaacatcactaacctgtgccccttcgacgaggtcttcaacgccacccgtttcgcttctgtgtacgcctggaaccgcaagcgtatctctaactgcgtcgccgactactcagtgctgtacaacttcgctcccttcttcgccttcaagtgctacggagtgtcaccaactaagctgaacgacctgtgcttcaccaacgtctacgctgactctttcgtgatcaggggtaacgaggtctcacagatcgctccaggccagactggaaacatcgccgactacaactacaagctgcctgacgacttcaccggttgcgtcatcgcttggaactccaacaagctggacagcaaagtgggtggcaactacaactaccagtacaggctgttcagaaagtccaacctgaagcccttcgagcgtgacatcagcactgaaatctaccaggctggtaacaagccatgcaacggtgtcgccggcttcaactgctacttccccctgcgctcctacggcttccgtccaacctacggtgtgggccaccagccttacagggtggtcgtgctgtccttcgaactcctccacgctccagctactgtgtgcggaccaaagaagagcaccaacctggtcaagaacaagtgcgtgaacttcaacttcaacggtctgaccggaactggtgtcctgaccgagtctaacaagaagttcctgcccttccagcagttcggtcgtgacatcgctgacactaccgacgccgtgagggacccccagaccctggaaatcctggacatcactccatgctctttcggaggtgtctcagtgatcactccaggaaccaacacttcaaaccaggtcgctgtgctgtaccagggtgtcaactgcaccgaagtccctgtggccatccacgctgaccagctgacccccacttggagagtgtacagcaccggctctaacgtcttccagactcgcgctggttgcctgatcggcgccgagtacgtgaacaactcttacgaatgcgacatccccatcggcgctggaatctgcgcctcataccagacccagactaagtcccaccagcaggctcagagcgtcgcctcacagtccatcatcgcttacaccatgtctctgggcgctgaaaacctggtggcctactcaaacaactccatcgccatccctaccaacttcactatctccgtgaccactgagatcctgcccgtctccatgaccaagactagcgtggactgcactatgtacatctgcggagactccaccgaatgcagcaacctgctgctgcagtacggtagcttctgcacccagctgaagcgtgctctgactggcatcgccgtggagcaggacaagaacactcaggaagtcttcgctcaggtgaagcaaatctacaagacccctcccatcaagtacttcggcggattcaacttctcccagatcctgcctgaccccagcaagccatctaagagatcattcatcgaggacctgctgttcaacaaggtcactctggccgacgctggtttcatcaagcagtacggagactgcctgggtgacatcgccgctcgcgacctgatctgcgctcagaagttcaacggcctgaccgtgctgccacctctgctgactgacgaaatgatcgcccagtacacttccgccctgctggctggaaccatcacttctggttggaccttcggtgctggtgctgctctgcagatccctttcgctatgcagatggcctacaggttcaacggaatcggtgtcacccagaacgtgctgtacgagaaccagaagctgatcgctaaccagttcaactccgccatcggcaagatccaggactccctgagctctactgccagcgctctgggaaagctgcaggacgtcgtgaaccacaacgcccaggctctgaacaccctggtcaagcagctgtcatccaagttcggagctatcagctctgtgctgaacgacatcctctcccgcctggaccctcctgaggctgaagtccagatcgacaggctgatcactggtagactgcagtctctgcagacctacgtgactcagcagctgatccgcgccgctgaaatccgtgcctcagctaacctggccgctaccaagatgtctgagtgcgtcctgggccagagcaagagggtggacttctgcggcaagggataccacctgatgtctttccctcagtcagctccccacggagtcgtgttcctgcacgtcacctacgtgccagcccaggagaagaacttcaccactgcccctgctatctgccacgacggcaaggctcacttcccccgtgaaggagtcttcgtgtccaacggcacccactggttcgtcactcagaggaacttctacgagccacagatcatcaccactgacaacactttcgtgagcggcaactgcgacgtggtcatcggtatcgtcaacaacaccgtgtacgaccccctgcagccagagctggactccttcaaggaagagctggacaagtacttcaagaaccacaccagcccagacgtcgacctgggcgacatctctggaatcaacgcttcagtcgtgaacatccagaaggagatcgaccgtctgaacgaagtggccaagaacctgaacgaatctctgatcgacctgcaggagctgggaaagtacgaacagtacatcaagtggccttggtacatctggctgggtttcatcgctggcctcatcgctatcgtgatggtgaccatcatgctgtgctgcatgacttcctgctgcagctgcctgaagggctgctgctcttgcggatcatgctgcaagttcgacgaggacgactcagaacccgtcctgaagggcgtgaagctgcactacacctaa

SEQ ID NO: 202 - DNA, 3813 bp, synthetic construct
  source 1..3813: mol_type = other DNA
atgttcgtcttcctggtgctgctgcctctggtctccagccagtgcgtgaacctgatcaccaggactcagtcctacaccaacagcttcactagaggtgtgtactaccctgacaaggtcttccgctcttcagtgctgcactctactcaggacctgttcctgcccttcttctcaaacgtcacctggttccacgccatccacgtgtccggcaccaacggcactaagagattcgacaacccagtgctgcctttcaacgacggcgtctacttcgcttctaccgagaagtcaaacatcatccgcggatggatcttcggcaccactctggactccaagactcagagcctgctgatcgtcaacaacgccaccaacgtggtcatcaaggtgtgcgaattccagttctgcaacgacccattcctggacgtgtactaccacaagaacaacaagtcttggatggagtcagaattcagagtctactccagcgctaacaactgcactttcgagtacgtgtctcagcctttcctgatggacctggaaggaaagcagggtaacttcaagaacctgcgtgagttcgtcttcaagaacatcgacggttacttcaagatttactctaagcacaccccaatcaacctgggtagggacctgcctcagggcttctcagctctggagccactggtggacctgcctatcggcatcaacatcaccaggttccagactctgctggctctgcacagaagctacctgactccaggagactcatcttctggatggactgctggagctgctgcttactacgtgggttacctgcagcctcgcaccttcctgctgaagtacaacgaaaacggcaccatcactgacgccgtcgactgcgctctggaccctctgtctgaaaccaagtgcactctgaagtcattcaccgtggagaagggcatctaccagacttccaacttccgcgtgcagcccaccgaaagcatcgtccgtttccctaacatcactaacctgtgccccttcgacgaggtcttcaacgccacccgtttcgcttctgtgtacgcctggaaccgcaagcgtatctctaactgcgtcgccgactactcagtgctgtacaacttcgctcccttcttcgccttcaagtgctacggagtgtcaccaactaagctgaacgacctgtgcttcaccaacgtctacgctgactctttcgtgatcaggggtaacgaggtccgtcagatcgctccaggccagactggaaacatcgccgactacaactacaagctgcctgacgacttcaccggttgcgtcatcgcttggaactccaacaagctggacagcaaagtgggtggcaactacaactaccagtacaggctgttcagaaagtccaacctgaagcccttcgagcgtgacatcagcactgaaatctaccaggctggtaacaagccatgcaacggtgtcgccggcttcaactgctacttccccctgcgctcctacggcttccgtccaacctacggtgtgggccaccagccttacagggtggtcgtgctgtccttcgaactcctccacgctccagctactgtgtgcggaccaaagaagagcaccaacctggtcaagaacaagtgcgtgaacttcaacttcaacggtctgaccggaactggtgtcctgaccgagtctaacaagaagttcctgcccttccagcagttcggtcgtgacatcgctgacactaccgacgccgtgagggacccccagaccctggaaatcctggacatcactccatgctctttcggaggtgtctcagtgatcactccaggaaccaacacttcaaaccaggtcgctgtgctgtaccagggtgtcaactgcaccgaagtccctgtggccatccacgctgaccagctgacccccacttggagagtgtacagcaccggctctaacgtcttccagactcgcgctggttgcctgatcggcgccgagtacgtgaacaactcttacgaatgcgacatccccatcggcgctggaatctgcgcctcataccagacccagactaagtcccaccagcaggctcagagcgtcgcctcacagtccatcatcgcttacaccatgtctctgggcgctgaaaacctggtggcctactcaaacaactccatcgccatccctaccaacttcactatctccgtgaccactgagatcctgcccgtctccatgaccaagactagcgtggactgcactatgtacatctgcggagactccaccgaatgcagcaacctgctgctgcagtacggtagcttctgcacccagctgaagcgtgctctgactggcatcgccgtggagcaggacaagaacactcaggaagtcttcgctcaggtgaagcaaatctacaagacccctcccatcaagtacttcggcggattcaacttctcccagatcctgcctgaccccagcaagccatctaagagatcattcatcgaggacctgctgttcaacaaggtcactctggccgacgctggtttcatcaagcagtacggagactgcctgggtgacatcgccgctcgcgacctgatctgcgctcagaagttcaacggcctgaccgtgctgccacctctgctgactgacgaaatgatcgcccagtacacttccgccctgctggctggaaccatcacttctggttggaccttcggtgctggtgctgctctgcagatccctttcgctatgcagatggcctacaggttcaacggaatcggtgtcacccagaacgtgctgtacgagaaccagaagctgatcgctaaccagttcaactccgccatcggcaagatccaggactccctgagctctactgccagcgctctgggaaagctgcaggacgtcgtgaaccacaacgcccaggctctgaacaccctggtcaagcagctgtcatccaagttcggagctatcagctctgtgctgaacgacatcctctcccgcctggaccctcctgaggctgaagtccagatcgacaggctgatcactggtagactgcagtctctgcagacctacgtgactcagcagctgatccgcgccgctgaaatccgtgcctcagctaacctggccgctaccaagatgtctgagtgcgtcctgggccagagcaagagggtggacttctgcggcaagggataccacctgatgtctttccctcagtcagctccccacggagtcgtgttcctgcacgtcacctacgtgccagcccaggagaagaacttcaccactgcccctgctatctgccacgacggcaaggctcacttcccccgtgaaggagtcttcgtgtccaacggcacccactggttcgtcactcagaggaacttctacgagccacagatcatcaccactgacaacactttcgtgagcggcaactgcgacgtggtcatcggtatcgtcaacaacaccgtgtacgaccccctgcagccagagctggactccttcaaggaagagctggacaagtacttcaagaaccacaccagcccagacgtcgacctgggcgacatctctggaatcaacgcttcagtcgtgaacatccagaaggagatcgaccgtctgaacgaagtggccaagaacctgaacgaatctctgatcgacctgcaggagctgggaaagtacgaacagtacatcaagtggccttggtacatctggctgggtttcatcgctggcctcatcgctatcgtgatggtgaccatcatgctgtgctgcatgacttcctgctgcagctgcctgaagggctgctgctcttgcggatcatgctgcaagttcgacgaggacgactcagaacccgtcctgaagggcgtgaagctgcactacacctaa

SEQ ID NO: 203 - protein, 1268 aa, synthetic construct
MFVFLVLLPLVSSQCVNLITRTQSYTNSFTRGVYYPDKVFRSSVLHSTQDLFLPFFSNVTWFHAISGTNGTKRFDNPVLPFNDGVYFASTEKSNIIRGWIFGTTLDSKTQSLLIVNNATNVVIKVCEFQFCNDPFLDVYYHKNNKSWMESEFRVYSSANNCTFEYVSQPFLMDLEGKQGNFKNLREFVFKNIDGYFKIYSKHTPINLGRDLPQGFSALEPLVDLPIGINITRFQTLLALHRSYLTPGDSSSGWTAGAAAYYVGYLQPRTFLLKYNENGTITDAVDCALDPLSETKCTLKSFTVEKGIYQTSNFRVQPTESIVRFPNITNLCPFDEVFNATTFASVYAWNRKRISNCVADYSVLYNFAPFFAFKCYGVSPTKLNDLCFTNVYADSFVIRGNEVSQIAPGQTGNIADYNYKLPDDFTGCVIAWNSNKLDSKVGGNYNYRYRLFRKSNLKPFERDISTEIYQAGNKPCNGVAGVNCYFPLQSYGFRPTYGVGHQPYRVVVLSFELLHAPATVCGPKKSTNLVKNKCVNFNFNGLTGTGVLTESNKKFLPFQQFGRDIADTTDAVRDPQTLEILDITPCSFGGVSVITPGTNTSNQVAVLYQGVNCTEVPVAIHADQLTPTWRVYSTGSNVFQTRAGCLIGAEYVNSSYECDIPIGAGICASYQTQTKSHQQAQSVASQSIIAYTMSLGAENSVAYSNNSIAIPTNFTISVTTEILPVSMTKTSVDCTMYICGDSTECSNLLLQYGSFCTQLKRALTGIAVEQDKNTQEVFAQVKQIYKTPPIKYFGGFNFSQILPDPSKPSKRSFIEDLLFNKVTLADAGFIKQYGDCLGDIAARDLICAQKFNGLTVLPPLLTDEMIAQYTSALLAGTITSGWTFGAGAALQIPFAMQMAYRFNGIGVTQNVLYENQKLIANQFNSAIGKIQDSLSSTASALGKLQDVVNHNAQALNTLVKQLSSKFGAISSVLNDILSRLDPPEAEVQIDRLITGRLQSLQTYVTQQLIRAAEIRASANLAATKMSECVLGQSKRVDFCGKGYHLMSFPQSAPHGVVFLHVTYVPAQEKNFTTAPAICHDGKAHFPREGVFVSNGTHWFVTQRNFYEPQIITTDNTFVSGNCDVVIGIVNNTVYDPLQPELDSFKEELDKYFKNHTSPDVDLGDISGINASVVNIQKEIDRLNEVAKNLNESLIDLQELGKYEQYIKWPWYIWLGFIAGLIAIVMVTIMLCCMTSCCSCLKGCCSCGSCCKFDEDDSEPVLKGVKLHYT

SEQ ID NO: 204 - DNA, 3807 bp, synthetic construct
  source 1..3807: mol_type = other DNA
atgttcgtcttcctggtgctgctgcctctggtctccagccagtgcgtgaacctgatcaccaggactcagtcctacaccaacagcttcactagaggtgtgtactaccctgacaaggtcttccgctcttcagtgctgcactctactcaggacctgttcctgcccttcttctcaaacgtcacctggttccacgccatctccggcaccaacggcactaagagattcgacaacccagtgctgcctttcaacgacggcgtctacttcgcttctaccgagaagtcaaacatcatccgcggatggatcttcggcaccactctggactccaagactcagagcctgctgatcgtcaacaacgccaccaacgtggtcatcaaggtgtgcgaattccagttctgcaacgacccattcctggacgtgtactaccacaagaacaacaagtcttggatggagtcagaattcagagtctactccagcgctaacaactgcactttcgagtacgtgtctcagcctttcctgatggacctggaaggaaagcagggtaacttcaagaacctgcgtgagttcgtcttcaagaacatcgacggttacttcaagatttactctaagcacaccccaatcaacctgggtagggacctgcctcagggcttctcagctctggagccactggtggacctgcctatcggcatcaacatcaccaggttccagactctgctggctctgcacagaagctacctgactccaggagactcatcttctggatggactgctggagctgctgcttactacgtgggttacctgcagcctcgcaccttcctgctgaagtacaacgaaaacggcaccatcactgacgccgtcgactgcgctctggaccctctgtctgaaaccaagtgcactctgaagtcattcaccgtggagaagggcatctaccagacttccaacttccgcgtgcagcccaccgaaagcatcgtccgtttccctaacatcactaacctgtgccccttcgacgaggtcttcaacgccaccaccttcgcttctgtgtacgcctggaaccgcaagcgtatctctaactgcgtcgccgactactcagtgctgtacaacttcgctcccttcttcgccttcaagtgctacggagtgtcaccaactaagctgaacgacctgtgcttcaccaacgtctacgctgactctttcgtgatcaggggtaacgaggtctcacagatcgctccaggccagactggaaacatcgccgactacaactacaagctgcctgacgacttcaccggttgcgtcatcgcttggaactccaacaagctggacagcaaagtgggtggcaactacaactaccgttacaggctgttcagaaagtccaacctgaagcccttcgagcgtgacatcagcactgaaatctaccaggctggtaacaagccatgcaacggtgtcgccggcgtcaactgctacttccccctgcagtcctacggcttccgtccaacctacggtgtgggccaccagccttacagggtggtcgtgctgtccttcgaactcctccacgctccagctactgtgtgcggaccaaagaagagcaccaacctggtcaagaacaagtgcgtgaacttcaacttcaacggtctgaccggaactggtgtcctgaccgagtctaacaagaagttcctgcccttccagcagttcggtcgtgacatcgctgacactaccgacgccgtgagggacccccagaccctggaaatcctggacatcactccatgctctttcggaggtgtctcagtgatcactccaggaaccaacacttcaaaccaggtcgctgtgctgtaccagggtgtcaactgcaccgaagtccctgtggccatccacgctgaccagctgacccccacttggagagtgtacagcaccggctctaacgtcttccagactcgcgctggttgcctgatcggcgccgagtacgtgaactcctcttacgaatgcgacatccccatcggcgctggaatctgcgcctcataccagacccagactaagtcccaccagcaggctcagagcgtcgcctcacagtccatcatcgcttacaccatgtctctgggcgctgaaaactcagtggcctactcaaacaactccatcgccatccctaccaacttcactatctccgtgaccactgagatcctgcccgtctccatgaccaagactagcgtggactgcactatgtacatctgcggagactccaccgaatgcagcaacctgctgctgcagtacggtagcttctgcacccagctgaagcgtgctctgactggcatcgccgtggagcaggacaagaacactcaggaagtcttcgctcaggtgaagcaaatctacaagacccctcccatcaagtacttcggcggattcaacttctcccagatcctgcctgaccccagcaagccatctaagagatcattcatcgaggacctgctgttcaacaaggtcactctggccgacgctggtttcatcaagcagtacggagactgcctgggtgacatcgccgctcgcgacctgatctgcgctcagaagttcaacggcctgaccgtgctgccacctctgctgactgacgaaatgatcgcccagtacacttccgccctgctggctggaaccatcacttctggttggaccttcggtgctggtgctgctctgcagatccctttcgctatgcagatggcctacaggttcaacggaatcggtgtcacccagaacgtgctgtacgagaaccagaagctgatcgctaaccagttcaactccgccatcggcaagatccaggactccctgagctctactgccagcgctctgggaaagctgcaggacgtcgtgaaccacaacgcccaggctctgaacaccctggtcaagcagctgtcatccaagttcggagctatcagctctgtgctgaacgacatcctctcccgcctggaccctcctgaggctgaagtccagatcgacaggctgatcactggtagactgcagtctctgcagacctacgtgactcagcagctgatccgcgccgctgaaatccgtgcctcagctaacctggccgctaccaagatgtctgagtgcgtcctgggccagagcaagagggtggacttctgcggcaagggataccacctgatgtctttccctcagtcagctccccacggagtcgtgttcctgcacgtcacctacgtgccagcccaggagaagaacttcaccactgcccctgctatctgccacgacggcaaggctcacttcccccgtgaaggagtcttcgtgtccaacggcacccactggttcgtcactcagaggaacttctacgagccacagatcatcaccactgacaacactttcgtgagcggcaactgcgacgtggtcatcggtatcgtcaacaacaccgtgtacgaccccctgcagccagagctggactccttcaaggaagagctggacaagtacttcaagaaccacaccagcccagacgtcgacctgggcgacatctctggaatcaacgcttcagtcgtgaacatccagaaggagatcgaccgtctgaacgaagtggccaagaacctgaacgaatctctgatcgacctgcaggagctgggaaagtacgaacagtacatcaagtggccttggtacatctggctgggtttcatcgctggcctcatcgctatcgtgatggtgaccatcatgctgtgctgcatgacttcctgctgcagctgcctgaagggctgctgctcttgcggatcatgctgcaagttcgacgaggacgactcagaacccgtcctgaagggcgtgaagctgcactacacctaa

SEQ ID NO: 205 - protein, 1270 aa, synthetic construct
MFVFLVLLPLVSSQCVNLITRTQSYTNSFTRGVYYPDKVFRSSVLHSTQDLFLPFFSNVTWFHAIHVSGTNGTKRFDNPVLPFNDGVYFASTEKSNIIRGWIFGTTLDSKTQSLLIVNNATNVVIKVCEFQFCNDPFLDVYYHENNKSRMESELRVYSSANNCTFEYVSQPFLMDLEGKQGNFKNLREFVFKNIDGYFKIYSKHTPVNLGRDLPQGFSALEPLVDLPIGINITRFQTLLALHRSYLTPGDSSSSWTAGAAAYYVGYLQPRTFLLKYNENGTITDAVDCALDPLSETKCTLKSFTVEKGIYQTSNFRVQPTESIVRFPNITNLCPFHEVFNATRFASVYAWNRKRISNCVADYSVLYNFAPFFAFKCYGVSPTKLNDLCFTNVYADSFVIRGNEVSQIAPGQTGNIADYNYKLPDDFTGCVIAWNSNKLDSKVSGNYNYLYRLFRKSKLKPFERDISTEIYQAGNKPCNGVAGFNCYFPLQSYGFRPTYGVGHQPYRVVVLSFELLHAPATVCGPKKSTNLVKNKCVNFNFNGLTGTGVLTESNKKFLPFQQFGRDIADTTDAVRDPQTLEILDITPCSFGGVSVITPGTNTSNQVAVLYQGVNCTEVPVAIHADQLTPTWRVYSTGSNVFQTRAGCLIGAEYVNNSYECDIPIGAGICASYQTQTKSHQQAQSVASQSIIAYTMSLGAENSVAYSNNSIAIPTNFTISVTTEILPVSMTKTSVDCTMYICGDSTECSNLLLQYGSFCTQLKRALTGIAVEQDKNTQEVFAQVKQIYKTPPIKYFGGFNFSQILPDPSKPSKRSFIEDLLFNKVTLADAGFIKQYGDCLGDIAARDLICAQKFNGLTVLPPLLTDEMIAQYTSALLAGTITSGWTFGAGAALQIPFAMQMAYRFNGIGVTQNVLYENQKLIANQFNSAIGKIQDSLSSTASALGKLQDVVNHNAQALNTLVKQLSSKFGAISSVLNDILSRLDPPEAEVQIDRLITGRLQSLQTYVTQQLIRAAEIRASANLAATKMSECVLGQSKRVDFCGKGYHLMSFPQSAPHGVVFLHVTYVPAQEKNFTTAPAICHDGKAHFPREGVFVSNGTHWFVTQRNFYEPQIITTDNTFVSGNCDVVIGIVNNTVYDPLQPELDSFKEELDKYFKNHTSPDVDLGDISGINASVVNIQKEIDRLNEVAKNLNESLIDLQELGKYEQYIKWPWYIWLGFIAGLIAIVMVTIMLCCMTSCCSCLKGCCSCGSCCKFDEDDSEPVLKGVKLHYT

SEQ ID NO: 206 - DNA, 3813 bp, synthetic construct
  source 1..3813: mol_type = other DNA
atgttcgtcttcctggtgctgctgcctctggtctccagccagtgcgtgaacctgatcaccaggactcagtcctacaccaacagcttcactagaggtgtgtactaccctgacaaggtcttccgctcttcagtgctgcactctactcaggacctgttcctgcccttcttctcaaacgtcacctggttccacgccatccacgtgtccggcaccaacggcactaagagattcgacaacccagtgctgcctttcaacgacggcgtctacttcgcttctaccgagaagtcaaacatcatccgcggatggatcttcggcaccactctggactccaagactcagagcctgctgatcgtcaacaacgccaccaacgtggtcatcaaggtgtgcgaattccagttctgcaacgacccattcctggacgtgtactaccacgagaacaacaagtctcgcatggagtcagaattgagagtctactccagcgctaacaactgcactttcgagtacgtgtctcagcctttcctgatggacctggaaggaaagcagggtaacttcaagaacctgcgtgagttcgtcttcaagaacatcgacggttacttcaagatttactctaagcacaccccagtgaacctgggtagggacctgcctcagggcttctcagctctggagccactggtggacctgcctatcggcatcaacatcaccaggttccagactctgctggctctgcacagaagctacctgactccaggagactcatcttctagctggactgctggagctgctgcttactacgtgggttacctgcagcctcgcaccttcctgctgaagtacaacgaaaacggcaccatcactgacgccgtcgactgcgctctggaccctctgtctgaaaccaagtgcactctgaagtcattcaccgtggagaagggcatctaccagacttccaacttccgcgtgcagcccaccgaaagcatcgtccgtttccctaacatcactaacctgtgccccttccacgaggtcttcaacgccacccgtttcgcttctgtgtacgcctggaaccgcaagcgtatctctaactgcgtcgccgactactcagtgctgtacaacttcgctcccttcttcgccttcaagtgctacggagtgtcaccaactaagctgaacgacctgtgcttcaccaacgtctacgctgactctttcgtgatcaggggtaacgaggtctcacagatcgctccaggccagactggaaacatcgccgactacaactacaagctgcctgacgacttcaccggttgcgtcatcgcttggaactccaacaagctggacagcaaagtgagcggcaactacaactacttgtacaggctgttcagaaagtccaaactgaagcccttcgagcgtgacatcagcactgaaatctaccaggctggtaacaagccatgcaacggtgtcgccggctttaactgctacttccccctgcagtcctacggcttccgtccaacctacggtgtgggccaccagccttacagggtggtcgtgctgtccttcgaactcctccacgctccagctactgtgtgcggaccaaagaagagcaccaacctggtcaagaacaagtgcgtgaacttcaacttcaacggtctgaccggaactggtgtcctgaccgagtctaacaagaagttcctgcccttccagcagttcggtcgtgacatcgctgacactaccgacgccgtgagggacccccagaccctggaaatcctggacatcactccatgctctttcggaggtgtctcagtgatcactccaggaaccaacacttcaaaccaggtcgctgtgctgtaccagggtgtcaactgcaccgaagtccctgtggccatccacgctgaccagctgacccccacttggagagtgtacagcaccggctctaacgtcttccagactcgcgctggttgcctgatcggcgccgagtacgtgaacaactcttacgaatgcgacatccccatcggcgctggaatctgcgcctcataccagacccagactaagtcccaccagcaggctcagagcgtcgcctcacagtccatcatcgcttacaccatgtctctgggcgctgaaaactcagtggcctactcaaacaactccatcgccatccctaccaacttcactatctccgtgaccactgagatcctgcccgtctccatgaccaagactagcgtggactgcactatgtacatctgcggagactccaccgaatgcagcaacctgctgctgcagtacggtagcttctgcacccagctgaagcgtgctctgactggcatcgccgtggagcaggacaagaacactcaggaagtcttcgctcaggtgaagcaaatctacaagacccctcccatcaagtacttcggcggattcaacttctcccagatcctgcctgaccccagcaagccatctaagagatcattcatcgaggacctgctgttcaacaaggtcactctggccgacgctggtttcatcaagcagtacggagactgcctgggtgacatcgccgctcgcgacctgatctgcgctcagaagttcaacggcctgaccgtgctgccacctctgctgactgacgaaatgatcgcccagtacacttccgccctgctggctggaaccatcacttctggttggaccttcggtgctggtgctgctctgcagatccctttcgctatgcagatggcctacaggttcaacggaatcggtgtcacccagaacgtgctgtacgagaaccagaagctgatcgctaaccagttcaactccgccatcggcaagatccaggactccctgagctctactgccagcgctctgggaaagctgcaggacgtcgtgaaccacaacgcccaggctctgaacaccctggtcaagcagctgtcatccaagttcggagctatcagctctgtgctgaacgacatcctctcccgcctggaccctcctgaggctgaagtccagatcgacaggctgatcactggtagactgcagtctctgcagacctacgtgactcagcagctgatccgcgccgctgaaatccgtgcctcagctaacctggccgctaccaagatgtctgagtgcgtcctgggccagagcaagagggtggacttctgcggcaagggataccacctgatgtctttccctcagtcagctccccacggagtcgtgttcctgcacgtcacctacgtgccagcccaggagaagaacttcaccactgcccctgctatctgccacgacggcaaggctcacttcccccgtgaaggagtcttcgtgtccaacggcacccactggttcgtcactcagaggaacttctacgagccacagatcatcaccactgacaacactttcgtgagcggcaactgcgacgtggtcatcggtatcgtcaacaacaccgtgtacgaccccctgcagccagagctggactccttcaaggaagagctggacaagtacttcaagaaccacaccagcccagacgtcgacctgggcgacatctctggaatcaacgcttcagtcgtgaacatccagaaggagatcgaccgtctgaacgaagtggccaagaacctgaacgaatctctgatcgacctgcaggagctgggaaagtacgaacagtacatcaagtggccttggtacatctggctgggtttcatcgctggcctcatcgctatcgtgatggtgaccatcatgctgtgctgcatgacttcctgctgcagctgcctgaagggctgctgctcttgcggatcatgctgcaagttcgacgaggacgactcagaacccgtcctgaagggcgtgaagctgcactacacctaa

SEQ ID NO: 207 - protein, 1270 aa, synthetic construct; identical to SEQ ID NO: 160

SEQ ID NO: 208 - DNA, 3810 bp, synthetic construct
  source 1..3810: mol_type = other DNA
atgttcgtcttcctggtgctgctgcccctggtgtccagccagtgcgtgaacctgaccactaggactcagctgcctcccgcttacaccaactcattcactcgcggtgtgtactaccctgacaaggtcttccgttcttcagtgctgcactcaactcaggacctgttcctgcccttcttctccaacgtcacctggttccacgtcatctccggcaccaacggcactaagcgcttcgacaacccagtgctgcctttcaacgacggtgtctacttcgcttcaattgagaagtccaacatcatccgtggatggatcttcggcaccactctggacagcaagactcagtctctgctgatcgtcaacaacgccaccaacgtggtcatcaaggtctgcgaattccagttctgcaacgacccattcctggaccacaagaacaacaagtcatggatggagtccgaattccgcgtctactccagcgctaacaactgcactttcgagtacgtgtcccagcctttcctgatggacctggaaggaaagcagggtaacttcaagaacctgagggagttcgtgttcaagaacatcgacggatacttcaagatttacagcaagcacaccccaatcattgtgcgcgagccggaggacctgcctcagggtttctctgctctggagccactggtggacctgcctatcggcatcaacatcacccgcttccagactctgctggctctgcaccgttcctacctgactccaggcgactcatcttctggatggactgctggagctgctgcttactacgtgggctacctgcagcctcgcaccttcctgctgaagtacaacgaaaacggaaccatcactgacgccgtcgactgcgctctggaccctctgtcagaaaccaagtgcactctgaagtccttcaccgtggagaagggcatctaccagacttcaaacttcagggtgcagcccaccgaatccatcgtcagattccctaacatcactaacctgtgccccttcgacgaggtcttcaacgccacccgcttcgcttccgtgtacgcctggaacaggaagagaatctcaaactgcgtcgctgactactccgtgctgtacaaccttgccccgttctttaccttcaagtgctacggcgtgtcaccaactaagctgaacgacctgtgcttcaccaacgtctacgccgactccttcgtgatcaggggagacgaggtcagacagatcgctcctggccagactggaaatatcgccgactacaactacaagctgcccgacgacttcaccggttgcgtcatcgcttggaacagcaacaaactggactctaaagtgagtggcaactacaactacctgtaccgcctgttccgtaagtcaaacctgaagccattcgagagggacatcagcactgaaatctaccaggccggaaataaaccttgcaacggtgtcgcgggcttcaactgctacttccccctgaggtcctactctttccgaccaacttatggtgtgggccaccagccttacagagtggtcgtgctgagcttcgaactgctccacgctcctgctactgtgtgcggtccaaagaagtctaccaacctggtcaagaacaagtgcgtgaacttcaacttcaacggcctgaaaggaactggtgtcctgaccgagagcaacaagaagttcctgcccttccagcagttcggaagggacatcgctgacaccactgacgctgtgcgcgaccctcagaccctggaaatcctggacatcactccatgctcattcggaggtgtctccgtgatcacccctggcaccaacacttctaaccaggtcgctgtgctgtaccagggcgtcaactgcaccgaggtccctgtggccatccacgctgaccagctgacccccacttggcgcgtgtactccaccggcagcaacgtgttccagactcgtgctggttgcctgatcggcgccgagtacgtgaacaacagctacgaatgcgacatccccatcggcgctggaatctgcgcctcttaccagacccagactaagagccaccagcaggctcagtctgtggcctctcagtcaatcatcgcttacaccatgtcactgggcgctgaaaactccgtggcctactctaacaactcaatcgccatccccaccaacttcactatcagcgtgaccactgagatcctgccagtcagcatgaccaagacttctgtggactgcactatgtacatctgcggagacagcaccgaatgctctaacctgctgctgcagtacggctctttctgcacccagctgaagcgtgctctgactggaatcgccgtggagcaggacaagaacactcaggaagtcttcgctcaggtgaagcaaatctacaagaccccacctatcaagtacttcggcggattcaacttctcccagatcctgcctgacccctccaagccaagcaagcgctctttcatcgaggacctgctgttcaacaaggtcactctggccgacgctggattcatcaagcagtacggagactgcctgggtgacatcgccgctcgtgacctgatctgcgctcagaagttcaagggtctgaccgtgctgcccccactgctgactgacgaaatgatcgcccagtacactagcgccctgctggctggaaccatcacttctggttggaccttcggtgctggcgccgctctgcagatccctttcgctatgcagatggcctaccgtttcaacggaatcggtgtcacccagaacgtgctgtacgagaaccagaagctgatcgctaaccagttcaactcagccatcggaaagatccaggacagcctgagctctactgcctctgctctgggcaagctgcaggacgtcgtgaaccataacgcccaggctctgaacaccctggtcaagcagctgtcatccaagttcggtgctatcagctctgtgctgaacgacatcttctcccgcctggaccctcccgaggccgaagtgcagatcgaccgcctgatcactggccgtctgcagtcactgcagacctacgtgactcagcagctgatcagggccgctgaaatcagagcctccgctaacctggccgctaccaagatgagcgagtgcgtcctgggtcaatctaagcgtgtggacttctgcggcaagggataccacctgatgtcattccctcagtctgctccccacggtgtggtgttcctgcacgtcacctacgtgccagcccaggagaagaacttcaccactgcccctgctatctgccacgacggcaaggctcacttccccagggaaggtgtcttcgtgagcaacggcacccactggttcgtcactcagagaaacttctacgagccacagatcatcaccactgacaacactttcgtgtctggaaactgcgacgtggtcatcggtatcgtcaacaacaccgtgtacgaccccctgcagccagagctggactcattcaaggaggaactggacaagtacttcaagaaccacacctcccctgacgtcgacctgggcgacatctcaggaatcaacgcttccgtcgtgaacatccagaaggagatcgaccgcctgaacgaagtggccaagaacctgaacgaaagcctgatcgacctgcaggagctgggcaagtacgaacagtacatcaagtggccttggtacatctggctgggtttcatcgctggcctcatcgctatcgtgatggtgaccatcatgctgtgctgcatgacttcatgctgctcctgcctgaagggctgctgcagctgcggatcttgctgcaagttcgacgaggacgactctgaacccgtcctgaagggcgtgaagctgcactacacc

SEQ ID NO: 209 - protein, 1270 aa, synthetic construct
MFVFLVLLPLVSSQCVNLITRTQSYTNSFTRGVYYPDKVFRSSVLHSTQDLFLPFFSNVTWFHAIHVSGTNGTKRFDNPVLPFNDGVYFASTEKSNIIRGWIFGTTLDSKTQSLLIVNNATNVVIKVCEFQFCNDPFLDVYYHENNKSRMESELRVYSSANNCTFEYVSQPFLMDLEGKQGNFKNLREFVFKNIDGYFKIYSKHTPVNLGRDLPQGFSALEPLVDLPIGINITRFQTLLALHRSYLTPGDSSSSWTAGAAAYYVGYLQPRTFLLKYNENGTITDAVDCALDPLSETKCTLKSFTVEKGIYQTSNFRVQPTESIVRFPNITNLCPFHEVFNATTFASVYAWNRKRISNCVADYSVLYNFAPFFAFKCYGVSPTKLNDLCFTNVYADSFVIRGNEVSQIAPGQTGNIADYNYKLPDDFTGCVIAWNSNKLDSKVSGNYNYRYRLFRKSKLKPFERDISTEIYQAGNKPCNGVAGSNCYFPLQSYGFRPTYGVGHQPYRVVVLSFELLHAPATVCGPKKSTNLVKNKCVNFNFNGLTGTGVLTESNKKFLPFQQFGRDIADTTDAVRDPQTLEILDITPCSFGGVSVITPGTNISNQVAVLYQGVNCTEVPVAIHADQLTPTWRVYSTGSNVFQTRAGCLIGAEYVNNSYECDIPIGAGICASYQTQTKSHQQAQSVASQSIIAYTMSLGAENSVAYSNNSIAIPTNFTISVTTEILPVSMTKTSVDCTMYICGDSTECSNLLLQYGSFCTQLKRALTGIAVEQDKNTQEVFAQVKQIYKTPPIKYFGGFNFSQILPDPSKPSKRSFIEDLLFNKVTLADAGFIKQYGDCLGDIAARDLICAQKFNGLTVLPPLLTDEMIAQYTSALLAGTITSGWTFGAGAALQIPFAMQMAYRFNGIGVTQNVLYENQKLIANQFNSAIGKIQDSLSSTASALGKLQDVVNHNAQALNTLVKQLSSKFGAISSVLNDILSRLDPPEAEVQIDRLITGRLQSLQTYVTQQLIRAAEIRASANLAATKMSECVLGQSKRVDFCGKGYHLMSFPQSAPHGVVFLHVTYVPAQEKNFTTAPAICHDGKAHFPREGVFVSNGTHWFVTQRNFYEPQIITTDNTFVSGNCDVVIGIVNNTVYDPLQPELDSFKEELDKYFKNHTSPDVDLGDISGINASVVNIQKEIDRLNEVAKNLNESLINLQELGKYEQYIKWPWYIWLGFIAGLIAIVMVTIMLCCMTSCCSCLKGCCSCGSCCKFDEDDSEPVLKGVKLHYT

SEQ ID NO: 210 - DNA, 3813 bp, synthetic construct
  source 1..3813: mol_type = other DNA
atgttcgtcttcctggtgctgctgcctctggtctccagccagtgcgtgaacctgatcaccaggactcagtcctacaccaacagcttcactagaggtgtgtactaccctgacaaggtcttccgctcttcagtgctgcactctactcaggacctgttcctgcccttcttctcaaacgtcacctggttccacgccatccacgtgtccggcaccaacggcactaagagattcgacaacccagtgctgcctttcaacgacggcgtctacttcgcttctaccgagaagtcaaacatcatccgcggatggatcttcggcaccactctggactccaagactcagagcctgctgatcgtcaacaacgccaccaacgtggtcatcaaggtgtgcgaattccagttctgcaacgacccattcctggacgtgtactaccacgagaacaacaagtctcgcatggagtcagaattgagagtctactccagcgctaacaactgcactttcgagtacgtgtctcagcctttcctgatggacctggaaggaaagcagggtaacttcaagaacctgcgtgagttcgtcttcaagaacatcgacggttacttcaagatttactctaagcacaccccagtgaacctgggtagggacctgcctcagggcttctcagctctggagccactggtggacctgcctatcggcatcaacatcaccaggttccagactctgctggctctgcacagaagctacctgactccaggagactcatcttctagctggactgctggagctgctgcttactacgtgggttacctgcagcctcgcaccttcctgctgaagtacaacgaaaacggcaccatcactgacgccgtcgactgcgctctggaccctctgtctgaaaccaagtgcactctgaagtcattcaccgtggagaagggcatctaccagacttccaacttccgcgtgcagcccaccgaaagcatcgtccgtttccctaacatcactaacctgtgccccttccacgaggtcttcaacgccaccaccttcgcttctgtgtacgcctggaaccgcaagcgtatctctaactgcgtcgccgactactcagtgctgtacaacttcgctcccttcttcgccttcaagtgctacggagtgtcaccaactaagctgaacgacctgtgcttcaccaacgtctacgctgactctttcgtgatcaggggtaacgaggtctcacagatcgctccaggccagactggaaacatcgccgactacaactacaagctgcctgacgacttcaccggttgcgtcatcgcttggaactccaacaagctggacagcaaagtgagcggcaactacaactaccgttacaggctgttcagaaagtccaaactgaagcccttcgagcgtgacatcagcactgaaatctaccaggctggtaacaagccatgcaacggtgtcgccggctccaactgctacttccccctgcagtcctacggcttccgtccaacctacggtgtgggccaccagccttacagggtggtcgtgctgtccttcgaactcctccacgctccagctactgtgtgcggaccaaagaagagcaccaacctggtcaagaacaagtgcgtgaacttcaacttcaacggtctgaccggaactggtgtcctgaccgagtctaacaagaagttcctgcccttccagcagttcggtcgtgacatcgctgacactaccgacgccgtgagggacccccagaccctggaaatcctggacatcactccatgctctttcggaggtgtctcagtgatcactccaggaaccaacatctcaaaccaggtcgctgtgctgtaccagggtgtcaactgcaccgaagtccctgtggccatccacgctgaccagctgacccccacttggagagtgtacagcaccggctctaacgtcttccagactcgcgctggttgcctgatcggcgccgagtacgtgaacaactcttacgaatgcgacatccccatcggcgctggaatctgcgcctcataccagacccagactaagtcccaccagcaggctcagagcgtcgcctcacagtccatcatcgcttacaccatgtctctgggcgctgaaaactcagtggcctactcaaacaactccatcgccatccctaccaacttcactatctccgtgaccactgagatcctgcccgtctccatgaccaagactagcgtggactgcactatgtacatctgcggagactccaccgaatgcagcaacctgctgctgcagtacggtagcttctgcacccagctgaagcgtgctctgactggcatcgccgtggagcaggacaagaacactcaggaagtcttcgctcaggtgaagcaaatctacaagacccctcccatcaagtacttcggcggattcaacttctcccagatcctgcctgaccccagcaagccatctaagagatcattcatcgaggacctgctgttcaacaaggtcactctggccgacgctggtttcatcaagcagtacggagactgcctgggtgacatcgccgctcgcgacctgatctgcgctcagaagttcaacggcctgaccgtgctgccacctctgctgactgacgaaatgatcgcccagtacacttccgccctgctggctggaaccatcacttctggttggaccttcggtgctggtgctgctctgcagatccctttcgctatgcagatggcctacaggttcaacggaatcggtgtcacccagaacgtgctgtacgagaaccagaagctgatcgctaaccagttcaactccgccatcggcaagatccaggactccctgagctctactgccagcgctctgggaaagctgcaggacgtcgtgaaccacaacgcccaggctctgaacaccctggtcaagcagctgtcatccaagttcggagctatcagctctgtgctgaacgacatcctctcccgcctggaccctcctgaggctgaagtccagatcgacaggctgatcactggtagactgcagtctctgcagacctacgtgactcagcagctgatccgcgccgctgaaatccgtgcctcagctaacctggccgctaccaagatgtctgagtgcgtcctgggccagagcaagagggtggacttctgcggcaagggataccacctgatgtctttccctcagtcagctccccacggagtcgtgttcctgcacgtcacctacgtgccagcccaggagaagaacttcaccactgcccctgctatctgccacgacggcaaggctcacttcccccgtgaaggagtcttcgtgtccaacggcacccactggttcgtcactcagaggaacttctacgagccacagatcatcaccactgacaacactttcgtgagcggcaactgcgacgtggtcatcggtatcgtcaacaacaccgtgtacgaccccctgcagccagagctggactccttcaaggaagagctggacaagtacttcaagaaccacaccagcccagacgtcgacctgggcgacatctctggaatcaacgcttcagtcgtgaacatccagaaggagatcgaccgtctgaacgaagtggccaagaacctgaacgaatctctgatcaacctgcaggagctgggaaagtacgaacagtacatcaagtggccttggtacatctggctgggtttcatcgctggcctcatcgctatcgtgatggtgaccatcatgctgtgctgcatgacttcctgctgcagctgcctgaagggctgctgctcttgcggatcatgctgcaagttcgacgaggacgactcagaacccgtcctgaagggcgtgaagctgcactacacctaa

SEQ ID NO: 211 - protein, 1268 aa, synthetic construct
MFVFLVLLPLVSSQCVNLITRTQSYTNSFTRGVYYPDKVFRSSVLHSTQDLFLPFFSNVTWFHAISGTNGTKRFDNPVLPFNDGVYFASTEKSNIIRGWIFGTTLDSKTQSLLIVNNATNVVIKVCEFQFCNDPFLDVYYHKNNKSWMESEFRVYSSANNCTFEYVSQPFLMDLEGKQGNFKNLREFVFKNIDGYFKIYSKHTPINLGRDLPQGFSALEPLVDLPIGINITRFQTLLALHRSYLTPGDSSSGWTAGAAAYYVGYLQPRTFLLKYNENGTITDAVDCALDPLSETKCTLKSFTVEKGIYQTSNFRVQPTESIVRFPNITNLCPFDEVFNATTFASVYAWNRKRISNCVADYSVLYNFAPFFAFKCYGVSPTKLNDLCFTNVYADSFVIRGNEVSQIAPGQTGNIADYNYKLPDDFTGCVIAWNSNKLDSKVGGNYNYRYRLFRKSNLKPFERDISTEIYQAGNKPCNGVAGVNCYFPLQSYGFRPTYGVGHQPYRVVVLSFELLHAPATVCGPKKSTNLVKNKCVNFNFNGLTGTGVLTESNKKFLPFQQFGRDIADTTDAVRDPQTLEILDITPCSFGGVSVITPGTNTSNQVAVLYQGVNCTEVPVAIHADQLTPTWRVYSTGSNVFQTRAGCLIGAEYVNNSYECDIPIGAGICASYQTQTKSHQQAQSVASQSIIAYTMSLGAENSVAYSNNSIAIPTNFTISVTTEILPVSMTKTSVDCTMYICGDSTECSNLLLQYGSFCTQLKRALTGIAVEQDKNTQEVFAQVKQIYKTPPIKYFGGFNFSQILPDPSKPSKRSFIEDLLFNKVTLADAGFIKQYGDCLGDIAARDLICAQKFNGLTVLPPLLTDEMIAQYTSALLAGTITSGWTFGAGAALQIPFAMQMAYRFNGIGVTQNVLYENQKLIANQFNSAIGKIQDSLSSTASALGKLQDVVNHNAQALNTLVKQLSSKFGAISSVLNDILSRLDPPEAEVQIDRLITGRLQSLQTYVTQQLIRAAEIRASANLAATKMSECVLGQSKRVDFCGKGYHLMSFPQSAPHGVVFLHVTYVPAQEKNFTTAPAICHDGKAHFPREGVFVSNGTHWFVTQRNFYEPQIITTDNTFVSGNCDVVIGIVNNTVYDPLQPELDSFKEELDKYFKNHTSPDVDLGDISGINASVVNIQKEIDRLNEVAKNLNESLIDLQELGKYEQYIKWPWYIWLGFIAGLIAIVMVTIMLCCMTSCCSCLKGCCSCGSCCKFDEDDSEPVLKGVKLHYT

SEQ ID NO: 212 - DNA, 3807 bp, synthetic construct
  source 1..3807: mol_type = other DNA
atgttcgtcttcctggtgctgctgcctctggtctccagccagtgcgtgaacctgatcaccaggactcagtcctacaccaacagcttcactagaggtgtgtactaccctgacaaggtcttccgctcttcagtgctgcactctactcaggacctgttcctgcccttcttctcaaacgtcacctggttccacgccatctccggcaccaacggcactaagagattcgacaacccagtgctgcctttcaacgacggcgtctacttcgcttctaccgagaagtcaaacatcatccgcggatggatcttcggcaccactctggactccaagactcagagcctgctgatcgtcaacaacgccaccaacgtggtcatcaaggtgtgcgaattccagttctgcaacgacccattcctggacgtgtactaccacaagaacaacaagtcttggatggagtcagaattcagagtctactccagcgctaacaactgcactttcgagtacgtgtctcagcctttcctgatggacctggaaggaaagcagggtaacttcaagaacctgcgtgagttcgtcttcaagaacatcgacggttacttcaagatttactctaagcacaccccaatcaacctgggtagggacctgcctcagggcttctcagctctggagccactggtggacctgcctatcggcatcaacatcaccaggttccagactctgctggctctgcacagaagctacctgactccaggagactcatcttctggatggactgctggagctgctgcttactacgtgggttacctgcagcctcgcaccttcctgctgaagtacaacgaaaacggcaccatcactgacgccgtcgactgcgctctggaccctctgtctgaaaccaagtgcactctgaagtcattcaccgtggagaagggcatctaccagacttccaacttccgcgtgcagcccaccgaaagcatcgtccgtttccctaacatcactaacctgtgccccttcgacgaggtcttcaacgccaccaccttcgcttctgtgtacgcctggaaccgcaagcgtatctctaactgcgtcgccgactactcagtgctgtacaacttcgctcccttcttcgccttcaagtgctacggagtgtcaccaactaagctgaacgacctgtgcttcaccaacgtctacgctgactctttcgtgatcaggggtaacgaggtctcacagatcgctccaggccagactggaaacatcgccgactacaactacaagctgcctgacgacttcaccggttgcgtcatcgcttggaactccaacaagctggacagcaaagtgggtggcaactacaactaccgttacaggctgttcagaaagtccaacctgaagcccttcgagcgtgacatcagcactgaaatctaccaggctggtaacaagccatgcaacggtgtcgccggcgtcaactgctacttccccctgcagtcctacggcttccgtccaacctacggtgtgggccaccagccttacagggtggtcgtgctgtccttcgaactcctccacgctccagctactgtgtgcggaccaaagaagagcaccaacctggtcaagaacaagtgcgtgaacttcaacttcaacggtctgaccggaactggtgtcctgaccgagtctaacaagaagttcctgcccttccagcagttcggtcgtgacatcgctgacactaccgacgccgtgagggacccccagaccctggaaatcctggacatcactccatgctctttcggaggtgtctcagtgatcactccaggaaccaacacttcaaaccaggtcgctgtgctgtaccagggtgtcaactgcaccgaagtccctgtggccatccacgctgaccagctgacccccacttggagagtgtacagcaccggctctaacgtcttccagactcgcgctggttgcctgatcggcgccgagtacgtgaacaactcttacgaatgcgacatccccatcggcgctggaatctgcgcctcataccagacccagactaagtcccaccagcaggctcagagcgtcgcctcacagtccatcatcgcttacaccatgtctctgggcgctgaaaactcagtggcctactcaaacaactccatcgccatccctaccaacttcactatctccgtgaccactgagatcctgcccgtctccatgaccaagactagcgtggactgcactatgtacatctgcggagactccaccgaatgcagcaacctgctgctgcagtacggtagcttctgcacccagctgaagcgtgctctgactggcatcgccgtggagcaggacaagaacactcaggaagtcttcgctcaggtgaagcaaatctacaagacccctcccatcaagtacttcggcggattcaacttctcccagatcctgcctgaccccagcaagccatctaagagatcattcatcgaggacctgctgttcaacaaggtcactctggccgacgctggtttcatcaagcagtacggagactgcctgggtgacatcgccgctcgcgacctgatctgcgctcagaagttcaacggcctgaccgtgctgccacctctgctgactgacgaaatgatcgcccagtacacttccgccctgctggctggaaccatcacttctggttggaccttcggtgctggtgctgctctgcagatccctttcgctatgcagatggcctacaggttcaacggaatcggtgtcacccagaacgtgctgtacgagaaccagaagctgatcgctaaccagttcaactccgccatcggcaagatccaggactccctgagctctactgccagcgctctgggaaagctgcaggacgtcgtgaaccacaacgcccaggctctgaacaccctggtcaagcagctgtcatccaagttcggagctatcagctctgtgctgaacgacatcctctcccgcctggaccctcctgaggctgaagtccagatcgacaggctgatcactggtagactgcagtctctgcagacctacgtgactcagcagctgatccgcgccgctgaaatccgtgcctcagctaacctggccgctaccaagatgtctgagtgcgtcctgggccagagcaagagggtggacttctgcggcaagggataccacctgatgtctttccctcagtcagctccccacggagtcgtgttcctgcacgtcacctacgtgccagcccaggagaagaacttcaccactgcccctgctatctgccacgacggcaaggctcacttcccccgtgaaggagtcttcgtgtccaacggcacccactggttcgtcactcagaggaacttctacgagccacagatcatcaccactgacaacactttcgtgagcggcaactgcgacgtggtcatcggtatcgtcaacaacaccgtgtacgaccccctgcagccagagctggactccttcaaggaagagctggacaagtacttcaagaaccacaccagcccagacgtcgacctgggcgacatctctggaatcaacgcttcagtcgtgaacatccagaaggagatcgaccgtctgaacgaagtggccaagaacctgaacgaatctctgatcgacctgcaggagctgggaaagtacgaacagtacatcaagtggccttggtacatctggctgggtttcatcgctggcctcatcgctatcgtgatggtgaccatcatgctgtgctgcatgacttcctgctgcagctgcctgaagggctgctgctcttgcggatcatgctgcaagttcgacgaggacgactcagaacccgtcctgaagggcgtgaagctgcactacacctaa

SEQ ID NO: 213 - protein, 1268 aa, synthetic construct
MFVFLVLLPLVSSQCVNLITRTQSYTNSFTRGVYYPDKVFRSSVLHSTQDLFLPFFSNVTWFHAISGTNGTKRFDNPVLPFNDGVYFASTEKSNIIRGWIFGTTLDSKTQSLLIVNNATNVVIKVCEFQFCNDPFLDVYYHKNNKSWMESEFRVYSSANNCTFEYVSQPFLMDLEGKQGNFKNLREFVFKNIDGYFKIYSKHTPINLGRDLPQGFSALEPLVDLPIGINITRFQTLLALHRSYLTPGDSSSGWTAGAAAYYVGYLQPRTFLLKYNENGTITDAVDCALDPLSETKCTLKSFTVEKGIYQTSNFRVQPTESIVRFPNITNLCPFDEVFNATTFASVYAWNRKRISNCVADYSVLYNFAPFFAFKCYGVSPTKLNDLCFTNVYADSFVIRGNEVSQIAPGQTGNIADYNYKLPDDFTGCVIAWNSNKLDSTVGGNYNYRYRLFRKSKLKPFERDISTEIYQAGNKPCNGVAGVNCYFPLQSYGFRPTYGVGHQPYRVVVLSFELLHAPATVCGPKKSTNLVKNKCVNFNFNGLTGTGVLTESNKKFLPFQQFGRDIADTTDAVRDPQTLEILDITPCSFGGVSVITPGTNTSNQVAVLYQGVNCTEVPVAIHADQLTPTWRVYSTGSNVFQTRAGCLIGAEYVNNSYECDIPIGAGICASYQTQTKSHQQAQSVASQSIIAYTMSLGAENSVAYSNNSIAIPTNFTISVTTEILPVSMTKTSVDCTMYICGDSTECSNLLLQYGSFCTQLKRALTGIAVEQDKNTQEVFAQVKQIYKTPPIKYFGGFNFSQILPDPSKPSKRSFIEDLLFNKVTLADAGFIKQYGDCLGDIAARDLICAQKFNGLTVLPPLLTDEMIAQYTSALLAGTITSGWTFGAGAALQIPFAMQMAYRFNGIGVTQNVLYENQKLIANQFNSAIGKIQDSLSSTASALGKLQDVVNHNAQALNTLVKQLSSKFGAISSVLNDILSRLDPPEAEVQIDRLITGRLQSLQTYVTQQLIRAAEIRASANLAATKMSECVLGQSKRVDFCGKGYHLMSFPQSAPHGVVFLHVTYVPAQEKNFTTAPAICHDGKAHFPREGVFVSNGTHWFVTQRNFYEPQIITTDNTFVSGNCDVVIGIVNNTVYDPLQPELDSFKEELDKYFKNHTSPDVDLGDISGINASVVNIQKEIDRLNEVAKNLNESLIDLQELGKYEQYIKWPWYIWLGFIAGLIAIVMVTIMLCCMTSCCSCLKGCCSCGSCCKFDEDDSEPVLKGVKLHYT

SEQ ID NO: 214 - DNA, 3807 bp, synthetic construct
  source 1..3807: mol_type = other DNA
atgttcgtcttcctggtgctgctgcctctggtctccagccagtgcgtgaacctgatcaccaggactcagtcctacaccaacagcttcactagaggtgtgtactaccctgacaaggtcttccgctcttcagtgctgcactctactcaggacctgttcctgcccttcttctcaaacgtcacctggttccacgccatctccggcaccaacggcactaagagattcgacaacccagtgctgcctttcaacgacggcgtctacttcgcttctaccgagaagtcaaacatcatccgcggatggatcttcggcaccactctggactccaagactcagagcctgctgatcgtcaacaacgccaccaacgtggtcatcaaggtgtgcgaattccagttctgcaacgacccattcctggacgtgtactaccacaagaacaacaagtcttggatggagtcagaattcagagtctactccagcgctaacaactgcactttcgagtacgtgtctcagcctttcctgatggacctggaaggaaagcagggtaacttcaagaacctgcgtgagttcgtcttcaagaacatcgacggttacttcaagatttactctaagcacaccccaatcaacctgggtagggacctgcctcagggcttctcagctctggagccactggtggacctgcctatcggcatcaacatcaccaggttccagactctgctggctctgcacagaagctacctgactccaggagactcatcttctggatggactgctggagctgctgcttactacgtgggttacctgcagcctcgcaccttcctgctgaagtacaacgaaaacggcaccatcactgacgccgtcgactgcgctctggaccctctgtctgaaaccaagtgcactctgaagtcattcaccgtggagaagggcatctaccagacttccaacttccgcgtgcagcccaccgaaagcatcgtccgtttccctaacatcactaacctgtgccccttcgacgaggtcttcaacgccaccaccttcgcttctgtgtacgcctggaaccgcaagcgtatctctaactgcgtcgccgactactcagtgctgtacaacttcgctcccttcttcgccttcaagtgctacggagtgtcaccaactaagctgaacgacctgtgcttcaccaacgtctacgctgactctttcgtgatcaggggtaacgaggtctcacagatcgctccaggccagactggaaacatcgccgactacaactacaagctgcctgacgacttcaccggttgcgtcatcgcttggaactccaacaagctggacagcaccgtgggtggcaactacaactaccgttacaggctgttcagaaagtccaagctgaagcccttcgagcgtgacatcagcactgaaatctaccaggctggtaacaagccatgcaacggtgtcgccggcgtcaactgctacttccccctgcagtcctacggcttccgtccaacctacggtgtgggccaccagccttacagggtggtcgtgctgtccttcgaactcctccacgctccagctactgtgtgcggaccaaagaagagcaccaacctggtcaagaacaagtgcgtgaacttcaacttcaacggtctgaccggaactggtgtcctgaccgagtctaacaagaagttcctgcccttccagcagttcggtcgtgacatcgctgacactaccgacgccgtgagggacccccagaccctggaaatcctggacatcactccatgctctttcggaggtgtctcagtgatcactccaggaaccaacacttcaaaccaggtcgctgtgctgtaccagggtgtcaactgcaccgaagtccctgtggccatccacgctgaccagctgacccccacttggagagtgtacagcaccggctctaacgtcttccagactcgcgctggttgcctgatcggcgccgagtacgtgaacaactcttacgaatgcgacatccccatcggcgctggaatctgcgcctcataccagacccagactaagtcccaccagcaggctcagagcgtcgcctcacagtccatcatcgcttacaccatgtctctgggcgctgaaaactcagtggcctactcaaacaactccatcgccatccctaccaacttcactatctccgtgaccactgagatcctgcccgtctccatgaccaagactagcgtggactgcactatgtacatctgcggagactccaccgaatgcagcaacctgctgctgcagtacggtagcttctgcacccagctgaagcgtgctctgactggcatcgccgtggagcaggacaagaacactcaggaagtcttcgctcaggtgaagcaaatctacaagacccctcccatcaagtacttcggcggattcaacttctcccagatcctgcctgaccccagcaagccatctaagagatcattcatcgaggacctgctgttcaacaaggtcactctggccgacgctggtttcatcaagcagtacggagactgcctgggtgacatcgccgctcgcgacctgatctgcgctcagaagttcaacggcctgaccgtgctgccacctctgctgactgacgaaatgatcgcccagtacacttccgccctgctggctggaaccatcacttctggttggaccttcggtgctggtgctgctctgcagatccctttcgctatgcagatggcctacaggttcaacggaatcggtgtcacccagaacgtgctgtacgagaaccagaagctgatcgctaaccagttcaactccgccatcggcaagatccaggactccctgagctctactgccagcgctctgggaaagctgcaggacgtcgtgaaccacaacgcccaggctctgaacaccctggtcaagcagctgtcatccaagttcggagctatcagctctgtgctgaacgacatcctctcccgcctggaccctcctgaggctgaagtccagatcgacaggctgatcactggtagactgcagtctctgcagacctacgtgactcagcagctgatccgcgccgctgaaatccgtgcctcagctaacctggccgctaccaagatgtctgagtgcgtcctgggccagagcaagagggtggacttctgcggcaagggataccacctgatgtctttccctcagtcagctccccacggagtcgtgttcctgcacgtcacctacgtgccagcccaggagaagaacttcaccactgcccctgctatctgccacgacggcaaggctcacttcccccgtgaaggagtcttcgtgtccaacggcacccactggttcgtcactcagaggaacttctacgagccacagatcatcaccactgacaacactttcgtgagcggcaactgcgacgtggtcatcggtatcgtcaacaacaccgtgtacgaccccctgcagccagagctggactccttcaaggaagagctggacaagtacttcaagaaccacaccagcccagacgtcgacctgggcgacatctctggaatcaacgcttcagtcgtgaacatccagaaggagatcgaccgtctgaacgaagtggccaagaacctgaacgaatctctgatcgacctgcaggagctgggaaagtacgaacagtacatcaagtggccttggtacatctggctgggtttcatcgctggcctcatcgctatcgtgatggtgaccatcatgctgtgctgcatgacttcctgctgcagctgcctgaagggctgctgctcttgcggatcatgctgcaagttcgacgaggacgactcagaacccgtcctgaagggcgtgaagctgcactacacctaa

SEQ ID NO: 215 - protein, 1268 aa, synthetic construct
MFVFLVLLPLVSSQCVNLITRTQSYTNSFTRGVYYPDKVFRSSVLHSTQDLFLPFFSNVTWFHAISGTNGTKRFDNPVLPFNDGVYFASTEKSNIIRGWIFGTTLDSKTQSLLIVNNATNVVIKVCEFQFCNDPFLDVYYHKNNKSWMESEFRVYSSANNCTFEYVSQPFLMDLEGKQGNFKNLREFVFKNIDGYFKIYSKHTPINLGRDLPQGFSALEPLVDLPIGINITRFQTLLALHRSYLTPGDSSSGWTAGAAAYYVGYLQPRTFLLKYNENGTITDAVDCALDPLSETKCTLKSFTVEKGIYQTSNFRVQPTESIVRFPNITNLCPFDEVFNATRFASVYAWNRKRISNCVADYSVLYNFAPFFAFKCYGVSPTKLNDLCFTNVYADSFVIRGNEVSQIAPGQTGNIADYNYKLPDDFTGCVIAWNSNKLDSTVGGNYNYRYRLFRKSKLKPFERDISTEIYQAGNKPCNGVAGVNCYFPLQSYGFRPTYGVGHQPYRVVVLSFELLHAPATVCGPKKSTNLVKNKCVNFNFNGLTGTGVLTESNKKFLPFQQFGRDIADTTDAVRDPQTLEILDITPCSFGGVSVITPGTNTSNQVAVLYQGVNCTEVPVAIHADQLTPTWRVYSTGSNVFQTRAGCLIGAEYVNNSYECDIPIGAGICASYQTQTKSHQQAQSVASQSIIAYTMSLGAENSVAYSNNSIAIPTNFTISVTTEILPVSMTKTSVDCTMYICGDSTECSNLLLQYGSFCTQLKRALTGIAVEQDKNTQEVFAQVKQIYKTPPIKYFGGFNFSQILPDPSKPSKRSFIEDLLFNKVTLADAGFIKQYGDCLGDIAARDLICAQKFNGLTVLPPLLTDEMIAQYTSALLAGTITSGWTFGAGAALQIPFAMQMAYRFNGIGVTQNVLYENQKLIANQFNSAIGKIQDSLSSTASALGKLQDVVNHNAQALNTLVKQLSSKFGAISSVLNDILSRLDPPEAEVQIDRLITGRLQSLQTYVTQQLIRAAEIRASANLAATKMSECVLGQSKRVDFCGKGYHLMSFPQSAPHGVVFLHVTYVPAQEKNFTTAPAICHDGKAHFPREGVFVSNGTHWFVTQRNFYEPQIITTDNTFVSGNCDVVIGIVNNTVYDPLQPELDSFKEELDKYFKNHTSPDVDLGDISGINASVVNIQKEIDRLNEVAKNLNESLIDLQELGKYEQYIKWPWYIWLGFIAGLIAIVMVTIMLCCMTSCCSCLKGCCSCGSCCKFDEDDSEPVLKGVKLHYT

SEQ ID NO: 216 - DNA, 3807 bp, synthetic construct
  source 1..3807: mol_type = other DNA
atgttcgtcttcctggtgctgctgcctctggtctccagccagtgcgtgaacctgatcaccaggactcagtcctacaccaacagcttcactagaggtgtgtactaccctgacaaggtcttccgctcttcagtgctgcactctactcaggacctgttcctgcccttcttctcaaacgtcacctggttccacgccatctccggcaccaacggcactaagagattcgacaacccagtgctgcctttcaacgacggcgtctacttcgcttctaccgagaagtcaaacatcatccgcggatggatcttcggcaccactctggactccaagactcagagcctgctgatcgtcaacaacgccaccaacgtggtcatcaaggtgtgcgaattccagttctgcaacgacccattcctggacgtgtactaccacaagaacaacaagtcttggatggagtcagaattcagagtctactccagcgctaacaactgcactttcgagtacgtgtctcagcctttcctgatggacctggaaggaaagcagggtaacttcaagaacctgcgtgagttcgtcttcaagaacatcgacggttacttcaagatttactctaagcacaccccaatcaacctgggtagggacctgcctcagggcttctcagctctggagccactggtggacctgcctatcggcatcaacatcaccaggttccagactctgctggctctgcacagaagctacctgactccaggagactcatcttctggatggactgctggagctgctgcttactacgtgggttacctgcagcctcgcaccttcctgctgaagtacaacgaaaacggcaccatcactgacgccgtcgactgcgctctggaccctctgtctgaaaccaagtgcactctgaagtcattcaccgtggagaagggcatctaccagacttccaacttccgcgtgcagcccaccgaaagcatcgtccgtttccctaacatcactaacctgtgccccttcgacgaggtcttcaacgccacccgtttcgcttctgtgtacgcctggaaccgcaagcgtatctctaactgcgtcgccgactactcagtgctgtacaacttcgctcccttcttcgccttcaagtgctacggagtgtcaccaactaagctgaacgacctgtgcttcaccaacgtctacgctgactctttcgtgatcaggggtaacgaggtctcacagatcgctccaggccagactggaaacatcgccgactacaactacaagctgcctgacgacttcaccggttgcgtcatcgcttggaactccaacaagctggacagcaccgtgggtggcaactacaactaccgttacaggctgttcagaaagtccaagctgaagcccttcgagcgtgacatcagcactgaaatctaccaggctggtaacaagccatgcaacggtgtcgccggcgtcaactgctacttccccctgcagtcctacggcttccgtccaacctacggtgtgggccaccagccttacagggtggtcgtgctgtccttcgaactcctccacgctccagctactgtgtgcggaccaaagaagagcaccaacctggtcaagaacaagtgcgtgaacttcaacttcaacggtctgaccggaactggtgtcctgaccgagtctaacaagaagttcctgcccttccagcagttcggtcgtgacatcgctgacactaccgacgccgtgagggacccccagaccctggaaatcctggacatcactccatgctctttcggaggtgtctcagtgatcactccaggaaccaacacttcaaaccaggtcgctgtgctgtaccagggtgtcaactgcaccgaagtccctgtggccatccacgctgaccagctgacccccacttggagagtgtacagcaccggctctaacgtcttccagactcgcgctggttgcctgatcggcgccgagtacgtgaacaactcttacgaatgcgacatccccatcggcgctggaatctgcgcctcataccagacccagactaagtcccaccagcaggctcagagcgtcgcctcacagtccatcatcgcttacaccatgtctctgggcgctgaaaactcagtggcctactcaaacaactccatcgccatccctaccaacttcactatctccgtgaccactgagatcctgcccgtctccatgaccaagactagcgtggactgcactatgtacatctgcggagactccaccgaatgcagcaacctgctgctgcagtacggtagcttctgcacccagctgaagcgtgctctgactggcatcgccgtggagcaggacaagaacactcaggaagtcttcgctcaggtgaagcaaatctacaagacccctcccatcaagtacttcggcggattcaacttctcccagatcctgcctgaccccagcaagccatctaagagatcattcatcgaggacctgctgttcaacaaggtcactctggccgacgctggtttcatcaagcagtacggagactgcctgggtgacatcgccgctcgcgacctgatctgcgctcagaagttcaacggcctgaccgtgctgccacctctgctgactgacgaaatgatcgcccagtacacttccgccctgctggctggaaccatcacttctggttggaccttcggtgctggtgctgctctgcagatccctttcgctatgcagatggcctacaggttcaacggaatcggtgtcacccagaacgtgctgtacgagaaccagaagctgatcgctaaccagttcaactccgccatcggcaagatccaggactccctgagctctactgccagcgctctgggaaagctgcaggacgtcgtgaaccacaacgcccaggctctgaacaccctggtcaagcagctgtcatccaagttcggagctatcagctctgtgctgaacgacatcctctcccgcctggaccctcctgaggctgaagtccagatcgacaggctgatcactggtagactgcagtctctgcagacctacgtgactcagcagctgatccgcgccgctgaaatccgtgcctcagctaacctggccgctaccaagatgtctgagtgcgtcctgggccagagcaagagggtggacttctgcggcaagggataccacctgatgtctttccctcagtcagctccccacggagtcgtgttcctgcacgtcacctacgtgccagcccaggagaagaacttcaccactgcccctgctatctgccacgacggcaaggctcacttcccccgtgaaggagtcttcgtgtccaacggcacccactggttcgtcactcagaggaacttctacgagccacagatcatcaccactgacaacactttcgtgagcggcaactgcgacgtggtcatcggtatcgtcaacaacaccgtgtacgaccccctgcagccagagctggactccttcaaggaagagctggacaagtacttcaagaaccacaccagcccagacgtcgacctgggcgacatctctggaatcaacgcttcagtcgtgaacatccagaaggagatcgaccgtctgaacgaagtggccaagaacctgaacgaatctctgatcgacctgcaggagctgggaaagtacgaacagtacatcaagtggccttggtacatctggctgggtttcatcgctggcctcatcgctatcgtgatggtgaccatcatgctgtgctgcatgacttcctgctgcagctgcctgaagggctgctgctcttgcggatcatgctgcaagttcgacgaggacgactcagaacccgtcctgaagggcgtgaagctgcactacacctaa

SEQ ID NO: 217 - protein, 1257 aa, synthetic construct; identical to SEQ ID NO: 175

SEQ ID NO: 218 - protein, 1257 aa, synthetic construct; identical to SEQ ID NO: 195

SEQ ID NO: 219 - protein, 1257 aa, synthetic construct
QCVNLITRTQSYTNSFTRGVYYPDKVFRSSVLHSTQDLFLPFFSNVTWFHAIHVSGTNGTKRFDNPVLPFNDGVYFASTEKSNIIRGWIFGTTLDSKTQSLLIVNNATNVVIKVCEFQFCNDPFLDVYYHKNNKSWMESEFRVYSSANNCTFEYVSQPFLMDLEGKQGNFKNLREFVFKNIDGYFKIYSKHTPINLGRDLPQGFSALEPLVDLPIGINITRFQTLLALHRSYLTPGDSSSGWTAGAAAYYVGYLQPRTFLLKYNENGTITDAVDCALDPLSETKCTLKSFTVEKGIYQTSNFRVQPTESIVRFPNITNLCPFDEVFNATRFASVYAWNRKRISNCVADYSVLYNFAPFFAFKCYGVSPTKLNDLCFTNVYADSFVIRGNEVSQIAPGQTGNIADYNYKLPDDFTGCVIAWNSNKLDSKVGGNYNYQYRLFRKSNLKPFERDISTEIYQAGNKPCNGVAGFNCYFPLRSYGFRPTYGVGHQPYRVVVLSFELLHAPATVCGPKKSTNLVKNKCVNFNFNGLTGTGVLTESNKKFLPFQQFGRDIADTTDAVRDPQTLEILDITPCSFGGVSVITPGTNTSNQVAVLYQGVNCTEVPVAIHADQLTPTWRVYSTGSNVFQTRAGCLIGAEYVNNSYECDIPIGAGICASYQTQTKSHQQAQSVASQSIIAYTMSLGAENLVAYSNNSIAIPTNFTISVTTEILPVSMTKTSVDCTMYICGDSTECSNLLLQYGSFCTQLKRALTGIAVEQDKNTQEVFAQVKQIYKTPPIKYFGGFNFSQILPDPSKPSKRSFIEDLLFNKVTLADAGFIKQYGDCLGDIAARDLICAQKFNGLTVLPPLLTDEMIAQYTSALLAGTITSGWTFGAGAALQIPFAMQMAYRFNGIGVTQNVLYENQKLIANQFNSAIGKIQDSLSSTASALGKLQDVVNHNAQALNTLVKQLSSKFGAISSVLNDILSRLDPPEAEVQIDRLITGRLQSLQTYVTQQLIRAAEIRASANLAATKMSECVLGQSKRVDFCGKGYHLMSFPQSAPHGVVFLHVTYVPAQEKNFTTAPAICHDGKAHFPREGVFVSNGTHWFVTQRNFYEPQIITTDNTFVSGNCDVVIGIVNNTVYDPLQPELDSFKEELDKYFKNHTSPDVDLGDISGINASVVNIQKEIDRLNEVAKNLNESLIDLQELGKYEQYIKWPWYIWLGFIAGLIAIVMVTIMLCCMTSCCSCLKGCCSCGSCCKFDEDDSEPVLKGVKLHYT

SEQ ID NO: 220 - protein, 1257 aa, synthetic construct; identical to SEQ ID NO: 186

SEQ ID NO: 221 - protein, 1255 aa, synthetic construct; identical to SEQ ID NO: 190

SEQ ID NO: 222 - protein, 1255 aa, synthetic construct; identical to SEQ ID NO: 192

SEQ ID NO: 223 - protein, 1257 aa, synthetic construct
QCVNLITRTQSYTNSFTRGVYYPDKVFRSSVLHSTQDLFLPFFSNVTWFHAIHVSGTNGTKRFDNPVLPFNDGVYFASTEKSNIIRGWIFGTTLDSKTQSLLIVNNATNVVIKVCEFQFCNDPFLDVYYHENNKSRMESELRVYSSANNCTFEYVSQPFLMDLEGKQGNFKNLREFVFKNIDGYFKIYSKHTPVNLGRDLPQGFSALEPLVDLPIGINITRFQTLLALHRSYLTPGDSSSSWTAGAAAYYVGYLQPRTFLLKYNENGTITDAVDCALDPLSETKCTLKSFTVEKGIYQTSNFRVQPTESIVRFPNITNLCPFHEVFNATRFASVYAWNRKRISNCVADYSVLYNFAPFFAFKCYGVSPTKLNDLCFTNVYADSFVIRGNEVSQIAPGQTGNIADYNYKLPDDFTGCVIAWNSNKLDSKVSGNYNYLYRLFRKSKLKPFERDISTEIYQAGNKPCNGVAGFNCYFPLQSYGFRPTYGVGHQPYRVVVLSFELLHAPATVCGPKKSTNLVKNKCVNFNFNGLTGTGVLTESNKKFLPFQQFGRDIADTTDAVRDPQTLEILDITPCSFGGVSVITPGTNTSNQVAVLYQGVNCTEVPVAIHADQLTPTWRVYSTGSNVFQTRAGCLIGAEYVNNSYECDIPIGAGICASYQTQTKSHQQAQSVASQSIIAYTMSLGAENSVAYSNNSIAIPTNFTISVTTEILPVSMTKTSVDCTMYICGDSTECSNLLLQYGSFCTQLKRALTGIAVEQDKNTQEVFAQVKQIYKTPPIKYFGGFNFSQILPDPSKPSKRSFIEDLLFNKVTLADAGFIKQYGDCLGDIAARDLICAQKFNGLTVLPPLLTDEMIAQYTSALLAGTITSGWTFGAGAALQIPFAMQMAYRFNGIGVTQNVLYENQKLIANQFNSAIGKIQDSLSSTASALGKLQDVVNHNAQALNTLVKQLSSKFGAISSVLNDILSRLDPPEAEVQIDRLITGRLQSLQTYVTQQLIRAAEIRASANLAATKMSECVLGQSKRVDFCGKGYHLMSFPQSAPHGVVFLHVTYVPAQEKNFTTAPAICHDGKAHFPREGVFVSNGTHWFVTQRNFYEPQIITTDNTFVSGNCDVVIGIVNNTVYDPLQPELDSFKEELDKYFKNHTSPDVDLGDISGINASVVNIQKEIDRLNEVAKNLNESLIDLQELGKYEQYIKWPWYIWLGFIAGLIAIVMVTIMLCCMTSCCSCLKGCCSCGSCCKFDEDDSEPVLKGVKLHYT

SEQ ID NO: 224 - protein, 1257 aa, synthetic construct
QCVNLITRTQSYTNSFTRGVYYPDKVFRSSVLHSTQDLFLPFFSNVTWFHAIHVSGTNGTKRFDNPVLPFNDGVYFASTEKSNIIRGWIFGTTLDSKTQSLLIVNNATNVVIKVCEFQFCNDPFLDVYYHENNKSRMESELRVYSSANNCTFEYVSQPFLMDLEGKQGNFKNLREFVFKNIDGYFKIYSKHTPVNLGRDLPQGFSALEPLVDLPIGINITRFQTLLALHRSYLTPGDSSSSWTAGAAAYYVGYLQPRTFLLKYNENGTITDAVDCALDPLSETKCTLKSFTVEKGIYQTSNFRVQPTESIVRFPNITNLCPFHEVFNATTFASVYAWNRKRISNCVADYSVLYNFAPFFAFKCYGVSPTKLNDLCFTNVYADSFVIRGNEVSQIAPGQTGNIADYNYKLPDDFTGCVIAWNSNKLDSKVSGNYNYRYRLFRKSKLKPFERDISTEIYQAGNKPCNGVAGSNCYFPLQSYGFRPTYGVGHQPYRVVVLSFELLHAPATVCGPKKSTNLVKNKCVNFNFNGLTGTGVLTESNKKFLPFQQFGRDIADTTDAVRDPQTLEILDITPCSFGGVSVITPGTNISNQVAVLYQGVNCTEVPVAIHADQLTPTWRVYSTGSNVFQTRAGCLIGAEYVNNSYECDIPIGAGICASYQTQTKSHQQAQSVASQSIIAYTMSLGAENSVAYSNNSIAIPTNFTISVTTEILPVSMTKTSVDCTMYICGDSTECSNLLLQYGSFCTQLKRALTGIAVEQDKNTQEVFAQVKQIYKTPPIKYFGGFNFSQILPDPSKPSKRSFIEDLLFNKVTLADAGFIKQYGDCLGDIAARDLICAQKFNGLTVLPPLLTDEMIAQYTSALLAGTITSGWTFGAGAALQIPFAMQMAYRFNGIGVTQNVLYENQKLIANQFNSAIGKIQDSLSSTASALGKLQDVVNHNAQALNTLVKQLSSKFGAISSVLNDILSRLDPPEAEVQIDRLITGRLQSLQTYVTQQLIRAAEIRASANLAATKMSECVLGQSKRVDFCGKGYHLMSFPQSAPHGVVFLHVTYVPAQEKNFTTAPAICHDGKAHFPREGVFVSNGTHWFVTQRNFYEPQIITTDNTFVSGNCDVVIGIVNNTVYDPLQPELDSFKEELDKYFKNHTSPDVDLGDISGINASVVNIQKEIDRLNEVAKNLNESLINLQELGKYEQYIKWPWYIWLGFIAGLIAIVMVTIMLCCMTSCCSCLKGCCSCGSCCKFDEDDSEPVLKGVKLHYT

SEQ ID NO: 225 - protein, 1255 aa, synthetic construct
QCVNLITRTQSYTNSFTRGVYYPDKVFRSSVLHSTQDLFLPFFSNVTWFHAISGTNGTKRFDNPVLPFNDGVYFASTEKSNIIRGWIFGTTLDSKTQSLLIVNNATNVVIKVCEFQFCNDPFLDVYYHKNNKSWMESEFRVYSSANNCTFEYVSQPFLMDLEGKQGNFKNLREFVFKNIDGYFKIYSKHTPINLGRDLPQGFSALEPLVDLPIGINITRFQTLLALHRSYLTPGDSSSGWTAGAAAYYVGYLQPRTFLLKYNENGTITDAVDCALDPLSETKCTLKSFTVEKGIYQTSNFRVQPTESIVRFPNITNLCPFDEVFNATTFASVYAWNRKRISNCVADYSVLYNFAPFFAFKCYGVSPTKLNDLCFTNVYADSFVIRGNEVSQIAPGQTGNIADYNYKLPDDFTGCVIAWNSNKLDSKVGGNYNYRYRLFRKSNLKPFERDISTEIYQAGNKPCNGVAGVNCYFPLQSYGFRPTYGVGHQPYRVVVLSFELLHAPATVCGPKKSTNLVKNKCVNFNFNGLTGTGVLTESNKKFLPFQQFGRDIADTTDAVRDPQTLEILDITPCSFGGVSVITPGTNTSNQVAVLYQGVNCTEVPVAIHADQLTPTWRVYSTGSNVFQTRAGCLIGAEYVNSSYECDIPIGAGICASYQTQTKSHQQAQSVASQSIIAYTMSLGAENSVAYSNNSIAIPTNFTISVTTEILPVSMTKTSVDCTMYICGDSTECSNLLLQYGSFCTQLKRALTGIAVEQDKNTQEVFAQVKQIYKTPPIKYFGGFNFSQILPDPSKPSKRSFIEDLLFNKVTLADAGFIKQYGDCLGDIAARDLICAQKFNGLTVLPPLLTDEMIAQYTSALLAGTITSGWTFGAGAALQIPFAMQMAYRFNGIGVTQNVLYENQKLIANQFNSAIGKIQDSLSSTASALGKLQDVVNHNAQALNTLVKQLSSKFGAISSVLNDILSRLDPPEAEVQIDRLITGRLQSLQTYVTQQLIRAAEIRASANLAATKMSECVLGQSKRVDFCGKGYHLMSFPQSAPHGVVFLHVTYVPAQEKNFTTAPAICHDGKAHFPREGVFVSNGTHWFVTQRNFYEPQIITTDNTFVSGNCDVVIGIVNNTVYDPLQPELDSFKEELDKYFKNHTSPDVDLGDISGINASVVNIQKEIDRLNEVAKNLNESLIDLQELGKYEQYIKWPWYIWLGFIAGLIAIVMVTIMLCCMTSCCSCLKGCCSCGSCCKFDEDDSEPVLKGVKLHYT

SEQ ID NO: 226 - protein, 1255 aa, synthetic construct
QCVNLITRTQSYTNSFTRGVYYPDKVFRSSVLHSTQDLFLPFFSNVTWFHAISGTNGTKRFDNPVLPFNDGVYFASTEKSNIIRGWIFGTTLDSKTQSLLIVNNATNVVIKVCEFQFCNDPFLDVYYHKNNKSWMESEFRVYSSANNCTFEYVSQPFLMDLEGKQGNFKNLREFVFKNIDGYFKIYSKHTPINLGRDLPQGFSALEPLVDLPIGINITRFQTLLALHRSYLTPGDSSSGWTAGAAAYYVGYLQPRTFLLKYNENGTITDAVDCALDPLSETKCTLKSFTVEKGIYQTSNFRVQPTESIVRFPNITNLCPFDEVFNATTFASVYAWNRKRISNCVADYSVLYNFAPFFAFKCYGVSPTKLNDLCFTNVYADSFVIRGNEVSQIAPGQTGNIADYNYKLPDDFTGCVIAWNSNKLDSKVGGNYNYRYRLFRKSNLKPFERDISTEIYQAGNKPCNGVAGVNCYFPLQSYGFRPTYGVGHQPYRVVVLSFELLHAPATVCGPKKSTNLVKNKCVNFNFNGLTGTGVLTESNKKFLPFQQFGRDIADTTDAVRDPQTLEILDITPCSFGGVSVITPGTNTSNQVAVLYQGVNCTEVPVAIHADQLTPTWRVYSTGSNVFQTRAGCLIGAEYVNNSYECDIPIGAGICASYQTQTKSHQQAQSVASQSIIAYTMSLGAENSVAYSNNSIAIPTNFTISVTTEILPVSMTKTSVDCTMYICGDSTECSNLLLQYGSFCTQLKRALTGIAVEQDKNTQEVFAQVKQIYKTPPIKYFGGFNFSQILPDPSKPSKRSFIEDLLFNKVTLADAGFIKQYGDCLGDIAARDLICAQKFNGLTVLPPLLTDEMIAQYTSALLAGTITSGWTFGAGAALQIPFAMQMAYRFNGIGVTQNVLYENQKLIANQFNSAIGKIQDSLSSTASALGKLQDVVNHNAQALNTLVKQLSSKFGAISSVLNDILSRLDPPEAEVQIDRLITGRLQSLQTYVTQQLIRAAEIRASANLAATKMSECVLGQSKRVDFCGKGYHLMSFPQSAPHGVVFLHVTYVPAQEKNFTTAPAICHDGKAHFPREGVFVSNGTHWFVTQRNFYEPQIITTDNTFVSGNCDVVIGIVNNTVYDPLQPELDSFKEELDKYFKNHTSPDVDLGDISGINASVVNIQKEIDRLNEVAKNLNESLIDLQELGKYEQYIKWPWYIWLGFIAGLIAIVMVTIMLCCMTSCCSCLKGCCSCGSCCKFDEDDSEPVLKGVKLHYT

SEQ ID NO: 227 - protein, 1255 aa, synthetic construct
QCVNLITRTQSYTNSFTRGVYYPDKVFRSSVLHSTQDLFLPFFSNVTWFHAISGTNGTKRFDNPVLPFNDGVYFASTEKSNIIRGWIFGTTLDSKTQSLLIVNNATNVVIKVCEFQFCNDPFLDVYYHKNNKSWMESEFRVYSSANNCTFEYVSQPFLMDLEGKQGNFKNLREFVFKNIDGYFKIYSKHTPINLGRDLPQGFSALEPLVDLPIGINITRFQTLLALHRSYLTPGDSSSGWTAGAAAYYVGYLQPRTFLLKYNENGTITDAVDCALDPLSETKCTLKSFTVEKGIYQTSNFRVQPTESIVRFPNITNLCPFDEVFNATTFASVYAWNRKRISNCVADYSVLYNFAPFFAFKCYGVSPTKLNDLCFTNVYADSFVIRGNEVSQIAPGQTGNIADYNYKLPDDFTGCVIAWNSNKLDSTVGGNYNYRYRLFRKSKLKPFERDISTEIYQAGNKPCNGVAGVNCYFPLQSYGFRPTYGVGHQPYRVVVLSFELLHAPATVCGPKKSTNLVKNKCVNFNFNGLTGTGVLTESNKKFLPFQQFGRDIADTTDAVRDPQTLEILDITPCSFGGVSVITPGTNTSNQVAVLYQGVNCTEVPVAIHADQLTPTWRVYSTGSNVFQTRAGCLIGAEYVNNSYECDIPIGAGICASYQTQTKSHQQAQSVASQSIIAYTMSLGAENSVAYSNNSIAIPTNFTISVTTEILPVSMTKTSVDCTMYICGDSTECSNLLLQYGSFCTQLKRALTGIAVEQDKNTQEVFAQVKQIYKTPPIKYFGGFNFSQILPDPSKPSKRSFIEDLLFNKVTLADAGFIKQYGDCLGDIAARDLICAQKFNGLTVLPPLLTDEMIAQYTSALLAGTITSGWTFGAGAALQIPFAMQMAYRFNGIGVTQNVLYENQKLIANQFNSAIGKIQDSLSSTASALGKLQDVVNHNAQALNTLVKQLSSKFGAISSVLNDILSRLDPPEAEVQIDRLITGRLQSLQTYVTQQLIRAAEIRASANLAATKMSECVLGQSKRVDFCGKGYHLMSFPQSAPHGVVFLHVTYVPAQEKNFTTAPAICHDGKAHFPREGVFVSNGTHWFVTQRNFYEPQIITTDNTFVSGNCDVVIGIVNNTVYDPLQPELDSFKEELDKYFKNHTSPDVDLGDISGINASVVNIQKEIDRLNEVAKNLNESLIDLQELGKYEQYIKWPWYIWLGFIAGLIAIVMVTIMLCCMTSCCSCLKGCCSCGSCCKFDEDDSEPVLKGVKLHYT

SEQ ID NO: 228 - protein, 1255 aa, synthetic construct
QCVNLITRTQSYTNSFTRGVYYPDKVFRSSVLHSTQDLFLPFFSNVTWFHAISGTNGTKRFDNPVLPFNDGVYFASTEKSNIIRGWIFGTTLDSKTQSLLIVNNATNVVIKVCEFQFCNDPFLDVYYHKNNKSWMESEFRVYSSANNCTFEYVSQPFLMDLEGKQGNFKNLREFVFKNIDGYFKIYSKHTPINLGRDLPQGFSALEPLVDLPIGINITRFQTLLALHRSYLTPGDSSSGWTAGAAAYYVGYLQPRTFLLKYNENGTITDAVDCALDPLSETKCTLKSFTVEKGIYQTSNFRVQPTESIVRFPNITNLCPFDEVFNATRFASVYAWNRKRISNCVADYSVLYNFAPFFAFKCYGVSPTKLNDLCFTNVYADSFVIRGNEVSQIAPGQTGNIADYNYKLPDDFTGCVIAWNSNKLDSTVGGNYNYRYRLFRKSKLKPFERDISTEIYQAGNKPCNGVAGVNCYFPLQSYGFRPTYGVGHQPYRVVVLSFELLHAPATVCGPKKSTNLVKNKCVNFNFNGLTGTGVLTESNKKFLPFQQFGRDIADTTDAVRDPQTLEILDITPCSFGGVSVITPGTNTSNQVAVLYQGVNCTEVPVAIHADQLTPTWRVYSTGSNVFQTRAGCLIGAEYVNNSYECDIPIGAGICASYQTQTKSHQQAQSVASQSIIAYTMSLGAENSVAYSNNSIAIPTNFTISVTTEILPVSMTKTSVDCTMYICGDSTECSNLLLQYGSFCTQLKRALTGIAVEQDKNTQEVFAQVKQIYKTPPIKYFGGFNFSQILPDPSKPSKRSFIEDLLFNKVTLADAGFIKQYGDCLGDIAARDLICAQKFNGLTVLPPLLTDEMIAQYTSALLAGTITSGWTFGAGAALQIPFAMQMAYRFNGIGVTQNVLYENQKLIANQFNSAIGKIQDSLSSTASALGKLQDVVNHNAQALNTLVKQLSSKFGAISSVLNDILSRLDPPEAEVQIDRLITGRLQSLQTYVTQQLIRAAEIRASANLAATKMSECVLGQSKRVDFCGKGYHLMSFPQSAPHGVVFLHVTYVPAQEKNFTTAPAICHDGKAHFPREGVFVSNGTHWFVTQRNFYEPQIITTDNTFVSGNCDVVIGIVNNTVYDPLQPELDSFKEELDKYFKNHTSPDVDLGDISGINASVVNIQKEIDRLNEVAKNLNESLIDLQELGKYEQYIKWPWYIWLGFIAGLIAIVMVTIMLCCMTSCCSCLKGCCSCGSCCKFDEDDSEPVLKGVKLHYT

SEQ ID NO: 229 - protein, 1267 aa, synthetic construct
MFVFLVLLPLVSSQCVNLITRTQSYTNSFTRGVYYPDKVFRSSVLHSTQDLFLPFFSNVTWFHAISGTNGTKRFDNPVLPFNDGVYFASTEKSNIIRGWIFGTTLDSKTQSLLIVNNATNVVIKVCEFQFCNDPFLDVYQKNNKSWMESEFRVYSSANNCTFEYVSQPFLMDLEGKEGNFKNLREFVFKNIDGYFKIYSKHTPINLERDLPQGFSALEPLVDLPIGINITRFQTLLALHRSYLTPGDSSSGWTAGAAAYYVGYLQPRTFLLKYNENGTITDAVDCALDPLSETKCTLKSFTVEKGIYQTSNFRVQPTESIVRFPNITNLCPFHEVFNATTFASVYAWNRKRISNCVADYSVIYNFAPFFAFKCYGVSPTKLNDLCFTNVYADSFVIRGNEVSQIAPGQTGNIADYNYKLPDDFTGCVIAWNSNKLDSKPSGNYNYLYRLFRKSKLKPFERDISTEIYQAGNKPCNGVAGSNCYSPLQSYGFRPTYGVGHQPYRVVVLSFELLHAPATVCGPKKSTNLVKNKCVNFNFNGLTGTGVLTESNKKFLPFQQFGRDIADTTDAVRDPQTLEILDITPCSFGGVSVITPGTNTSNQVAVLYQGVNCTEVPVAIHADQLTPTWRVYSTGSNVFQTRAGCLIGAEYVNNSYECDIPIGAGICASYQTQTKSHQQAQSVASQSIIAYTMSLGAENSVAYSNNSIAIPTNFTISVTTEILPVSMTKTSVDCTMYICGDSTECSNLLLQYGSFCTQLKRALTGIAVEQDKNTQEVFAQVKQIYKTPPIKYFGGFNFSQILPDPSKPSKRSFIEDLLFNKVTLADAGFIKQYGDCLGDIAARDLICAQKFNGLTVLPPLLTDEMIAQYTSALLAGTITSGWTFGAGAALQIPFAMQMAYRFNGIGVTQNVLYENQKLIANQFNSAIGKIQDSLSSTASALGKLQDVVNHNAQALNTLVKQLSSKFGAISSVLNDILSRLDPPEAEVQIDRLITGRLQSLQTYVTQQLIRAAEIRASANLAATKMSECVLGQSKRVDFCGKGYHLMSFPQSAPHGVVFLHVTYVPAQEKNFTTAPAICHDGKAHFPREGVFVSNGTHWFVTQRNFYEPQIITTDNTFVSGNCDVVIGIVNNTVYDPLQPELDSFKEELDKYFKNHTSPDVDLGDISGINASVVNIQKEIDRLNEVAKNLNESLIDLQELGKYEQYIKWPWYIWLGFIAGLIAIVMVTIMLCCMTSCCSCLKGCCSCGSCCKFDEDDSEPVLKGVKLHYT

SEQ ID NO: 230 - protein, 1269 aa, synthetic construct
MFVFLVLLPLVSSQCVNLITRTQSYTNSFTRGVYYPDKVFRSSVLHSTQDLFLPFFSNVTWFHAIHVSGTNGTKRFDNPALPFNDGVYFASTEKSNIIRGWIFGTTLDSKTQSLLIVNNATNVVIKVCEFQFCNDPFLDVYQKNNKSWMESEFRVYSSANNCTFEYVSQPFLMDLEGKEGNFKNLREFVFKNIDGYFKIYSKHTPINLERDLPQGFSALEPLVDLPIGINITRFQTLLALHRSYLTPVDSSSGWTAGAAAYYVGYLQPRTFLLKYNENGTITDAVDCALDPLSETKCTLKSFTVEKGIYQTSNFRVQPTESIVRFPNITNLCPFHEVFNATTFASVYAWNRKRISNCVADYSVIYNFAPFFAFKCYGVSPTKLNDLCFTNVYADSFVIRGNEVSQIAPGQTGNIADYNYKLPDDFTGCVIAWNSNKLDSKPSGNYNYLYRLFRKSKLKPFERDISTEIYQAGNKPCNGVAGSNCYSPLQSYGFRPTYGVGHQPYRVVVLSFELLHAPATVCGPKKSTNLVKNKCVNFNFNGLTGTGVLTESNKKFLPFQQFGRDIADTTDAVRDPQTLEILDITPCSFGGVSVITPGTNTSNQVAVLYQGVNCTEVPVAIHADQLTPTWRVYSTGSNVFQTRAGCLIGAEYVNNSYECDIPIGAGICASYQTQTKSHQQAQSVASQSIIAYTMSLGAENSVAYSNNSIAIPTNFTISVTTEILPVSMTKTSVDCTMYICGDSTECSNLLLQYGSFCTQLKRALTGIAVEQDKNTQEVFAQVKQIYKTPPIKYFGGFNFSQILPDPSKPSKRSFIEDLLFNKVTLADAGFIKQYGDCLGDIAARDLICAQKFNGLTVLPPLLTDEMIAQYTSALLAGTITSGWTFGAGAALQIPFAMQMAYRFNGIGVTQNVLYENQKLIANQFNSAIGKIQDSLSSTASALGKLQDVVNHNAQALNTLVKQLSSKFGAISSVLNDILSRLDPPEAEVQIDRLITGRLQSLQTYVTQQLIRAAEIRASANLAATKMSECVLGQSKRVDFCGKGYHLMSFPQSAPHGVVFLHVTYVPAQEKNFTTAPAICHDGKAHFPREGVFVSNGTHWFVTQRNFYEPQIITTDNTFVSGNCDVVIGIVNNTVYDPLQPELDSFKEELDKYFKNHTSPDVDLGDISGINASVVNIQKEIDRLNEVAKNLNESLIDLQELGKYEQYIKWPWYIWLGFIAGLIAIVMVTIMLCCMTSCCSCLKGCCSCGSCCKFDEDDSEPVLKGVKLHYT

SEQ ID NO: 231 - protein, 1267 aa, synthetic construct
MFVFLVLLPLVSSQCVNLITRTQSYTNSFTRGVYYPDKVFRSSVLHSTQDLFLPFFSNVTWFHAISGTNGTKRFDNPVLPFNDGVYFASTEKSNIIRGWIFGTTLDSKTQSLLIVNNATNVVIKVCEFQFCNDPFLDVYHKNNKSWMESEFRVYSSANNCTFEYVSQPFLMDLEGKQGNFKNLREFVFKNIDGYFKIYSKHTPINLGRDLPQGFSALEPLVDLPIGINITRFQTLLALHRSYLTPGDSSSGWTAGAAAYYVGYLQPRTFLLKYNENGTITDAVDCALDPLSETKCTLKSFTVEKGIYQTSNFRVQPTESIVRFPNITNLCPFDEVFNATTFASVYAWNRKRISNCVADYSVLYNFAPFFAFKCYGVSPTKLNDLCFTNVYADSFVIRGNEVSQIAPGQTGNIADYNYKLPDDFTGCVIAWNSNKLDSKVGGNYNYRYRLFRKSNLKPFERDISTEIYQAGNKPCNGVAGVNCYFPLQSYGFRPTYGVGHQPYRVVVLSFELLHAPATVCGPKKSTNLVKNKCVNFNFNGLTGTGVLTESNKKFLPFQQFGRDIADTTDAVRDPQTLEILDITPCSFGGVSVITPGTNTSNQVAVLYQGVNCTEVPVAIHADQLTPTWRVYSTGSNVFQTRAGCLIGAEYVNNSYECDIPIGAGICASYQTQTKSHQQAQSVASQSIIAYTMSLGAENSVAYSNNSIAIPTNFTISVTTEILPVSMTKTSVDCTMYICGDSTECSNLLLQYGSFCTQLKRALTGIAVEQDKNTQEVFAQVKQIYKTPPIKYFGGFNFSQILPDPSKPSKRSFIEDLLFNKVTLADAGFIKQYGDCLGDIAARDLICAQKFNGLTVLPPLLTDEMIAQYTSALLAGTITSGWTFGAGAALQIPFAMQMAYRFNGIGVTQNVLYENQKLIANQFNSAIGKIQDSLSSTASALGKLQDVVNHNAQALNTLVKQLSSKFGAISSVLNDILSRLDPPEAEVQIDRLITGRLQSLQTYVTQQLIRAAEIRASANLAATKMSECVLGQSKRVDFCGKGYHLMSFPQSAPHGVVFLHVTYVPAQEKNFTTAPAICHDGKAHFPREGVFVSNGTHWFVTQRNFYEPQIITTDNTFVSGNCDVVIGIVNNTVYDPLQPELDSFKEELDKYFKNHTSPDVDLGDISGINASVVNIQKEIDRLNEVAKNLNESLIDLQELGKYEQYIKWPWYIWLGFIAGLIAIVMVTIMLCCMTSCCSCLKGCCSCGSCCKFDEDDSEPVLKGVKLHYT

SEQ ID NO: 232 - protein, 1270 aa, synthetic construct
MFVFLVLLPLVSSQCVNLITRTQSYTNSFTRGVYYPDKVFRSSVLHSTQDLFLPFFSNVTWFHAIHVSGTNGTKRFDNPVLPFNDGVYFASTEKSNIIRGWIFGTTLDSKTQSLLIVNNATNVVIKVCEFQFCNDPFLDVYYHXNNKSRMESELRVYSSANNCTFEYVSQPFLMDLEGKQGNFKNLREFVFKNIDGYFKIYSKHTPVNLGRDLPQGFSALEPLVDLPIGINITRFQTLLALHRSYLTPGDSSSSWTAGAAAYYVGYLQPRTFLLKYNENGTITDAVDCALDPLSETKCTLKSFTVEKGIYQTSNFRVQPTESIVRFPNITNLCPFHEVFNATTFASVYAWNRTRISNCVADYSVLYNFAPFFAFKCYGVSPTKLNDLCFTNVYADSFVIRGNEVSQIAPGQTGNIADYNYKLPDDFTGCVIAWNSNKLDSKVSGNYNYLYRLFRKSKLKPFERDISTEIYQAGNKPCNGVAGFNCYSPLQSYGFRPTYGVGHQPYRVVVLSFELLHAPATVCGPKKSTNLVKNKCVNFNFNGLTGTGVLTESNKKFLPFQQFGRDIADTTDAVRDPQTLEILDITPCSFGGVSVITPGTNTSNQVAVLYQGVNCTEVPVAIHADQLTPTWRVYSTGSNVFQTRAGCLIGAEYVNNSYECDIPIGAGICASYQTQTKSHQQAQSVASQSIIAYTMSLGAENSVAYSNNSIAIPTNFTISVTTEILPVSMTKTSVDCTMYICGDSTECSNLLLQYGSFCTQLKRALTGIAVEQDKNTQEVFAQVKQIYKTPPIKYFGGFNFSQILPDPSKPSKRSFIEDLLFNKVTLADAGFIKQYGDCLGDIAARDLICAQKFNGLTVLPPLLTDEMIAQYTSALLAGTITSGWTFGAGAALQIPFAMQMAYRFNGIGVTQNVLYENQKLIANQFNSAIGKIQDSLSSTASALGKLQDVVNHNAQALNTLVKQLSSKFGAISSVLNDILSRLDPPEAEVQIDRLITGRLQSLQTYVTQQLIRAAEIRASANLAATKMSECVLGQSKRVDFCGKGYHLMSFPQSAPHGVVFLHVTYVPAQEKNFTTAPAICHDGKAHFPREGVFVSNGTHWFVTQRNFYEPQIITTDNTFVSGNCDVVIGIVNNTVYDPLQPELDSFKEELDKYFKNHTSPDVDLGDISGINASVVNIQKEIDRLNEVAKNLNESLIDLQELGKYEQYIKWPWYIWLGFIAGLIAIVMVTIMLCCMTSCCSCLKGCCSCGSCCKFDEDDSEPVLKGVKLHYT

SEQ ID NO: 233 - protein, 1254 aa, synthetic construct
QCVNLITRTQSYTNSFTRGVYYPDKVFRSSVLHSTQDLFLPFFSNVTWFHAISGTNGTKRFDNPVLPFNDGVYFASTEKSNIIRGWIFGTTLDSKTQSLLIVNNATNVVIKVCEFQFCNDPFLDVYQKNNKSWMESEFRVYSSANNCTFEYVSQPFLMDLEGKEGNFKNLREFVFKNIDGYFKIYSKHTPINLERDLPQGFSALEPLVDLPIGINITRFQTLLALHRSYLTPGDSSSGWTAGAAAYYVGYLQPRTFLLKYNENGTITDAVDCALDPLSETKCTLKSFTVEKGIYQTSNFRVQPTESIVRFPNITNLCPFHEVFNATTFASVYAWNRKRISNCVADYSVIYNFAPFFAFKCYGVSPTKLNDLCFTNVYADSFVIRGNEVSQIAPGQTGNIADYNYKLPDDFTGCVIAWNSNKLDSKPSGNYNYLYRLFRKSKLKPFERDISTEIYQAGNKPCNGVAGSNCYSPLQSYGFRPTYGVGHQPYRVVVLSFELLHAPATVCGPKKSTNLVKNKCVNFNFNGLTGTGVLTESNKKFLPFQQFGRDIADTTDAVRDPQTLEILDITPCSFGGVSVITPGTNTSNQVAVLYQGVNCTEVPVAIHADQLTPTWRVYSTGSNVFQTRAGCLIGAEYVNNSYECDIPIGAGICASYQTQTKSHQQAQSVASQSIIAYTMSLGAENSVAYSNNSIAIPTNFTISVTTEILPVSMTKTSVDCTMYICGDSTECSNLLLQYGSFCTQLKRALTGIAVEQDKNTQEVFAQVKQIYKTPPIKYFGGFNFSQILPDPSKPSKRSFIEDLLFNKVTLADAGFIKQYGDCLGDIAARDLICAQKFNGLTVLPPLLTDEMIAQYTSALLAGTITSGWTFGAGAALQIPFAMQMAYRFNGIGVTQNVLYENQKLIANQFNSAIGKIQDSLSSTASALGKLQDVVNHNAQALNTLVKQLSSKFGAISSVLNDILSRLDPPEAEVQIDRLITGRLQSLQTYVTQQLIRAAEIRASANLAATKMSECVLGQSKRVDFCGKGYHLMSFPQSAPHGVVFLHVTYVPAQEKNFTTAPAICHDGKAHFPREGVFVSNGTHWFVTQRNFYEPQIITTDNTFVSGNCDVVIGIVNNTVYDPLQPELDSFKEELDKYFKNHTSPDVDLGDISGINASVVNIQKEIDRLNEVAKNLNESLIDLQELGKYEQYIKWPWYIWLGFIAGLIAIVMVTIMLCCMTSCCSCLKGCCSCGSCCKFDEDDSEPVLKGVKLHYT

SEQ ID NO: 234 - protein, 1256 aa, synthetic construct
QCVNLITRTQSYTNSFTRGVYYPDKVFRSSVLHSTQDLFLPFFSNVTWFHAIHVSGTNGTKRFDNPALPFNDGVYFASTEKSNIIRGWIFGTTLDSKTQSLLIVNNATNVVIKVCEFQFCNDPFLDVYQKNNKSWMESEFRVYSSANNCTFEYVSQPFLMDLEGKEGNFKNLREFVFKNIDGYFKIYSKHTPINLERDLPQGFSALEPLVDLPIGINITRFQTLLALHRSYLTPVDSSSGWTAGAAAYYVGYLQPRTFLLKYNENGTITDAVDCALDPLSETKCTLKSFTVEKGIYQTSNFRVQPTESIVRFPNITNLCPFHEVFNATTFASVYAWNRKRISNCVADYSVIYNFAPFFAFKCYGVSPTKLNDLCFTNVYADSFVIRGNEVSQIAPGQTGNIADYNYKLPDDFTGCVIAWNSNKLDSKPSGNYNYLYRLFRKSKLKPFERDISTEIYQAGNKPCNGVAGSNCYSPLQSYGFRPTYGVGHQPYRVVVLSFELLHAPATVCGPKKSTNLVKNKCVNFNFNGLTGTGVLTESNKKFLPFQQFGRDIADTTDAVRDPQTLEILDITPCSFGGVSVITPGTNTSNQVAVLYQGVNCTEVPVAIHADQLTPTWRVYSTGSNVFQTRAGCLIGAEYVNNSYECDIPIGAGICASYQTQTKSHQQAQSVASQSIIAYTMSLGAENSVAYSNNSIAIPTNFTISVTTEILPVSMTKTSVDCTMYICGDSTECSNLLLQYGSFCTQLKRALTGIAVEQDKNTQEVFAQVKQIYKTPPIKYFGGFNFSQILPDPSKPSKRSFIEDLLFNKVTLADAGFIKQYGDCLGDIAARDLICAQKFNGLTVLPPLLTDEMIAQYTSALLAGTITSGWTFGAGAALQIPFAMQMAYRFNGIGVTQNVLYENQKLIANQFNSAIGKIQDSLSSTASALGKLQDVVNHNAQALNTLVKQLSSKFGAISSVLNDILSRLDPPEAEVQIDRLITGRLQSLQTYVTQQLIRAAEIRASANLAATKMSECVLGQSKRVDFCGKGYHLMSFPQSAPHGVVFLHVTYVPAQEKNFTTAPAICHDGKAHFPREGVFVSNGTHWFVTQRNFYEPQIITTDNTFVSGNCDVVIGIVNNTVYDPLQPELDSFKEELDKYFKNHTSPDVDLGDISGINASVVNIQKEIDRLNEVAKNLNESLIDLQELGKYEQYIKWPWYIWLGFIAGLIAIVMVTIMLCCMTSCCSCLKGCCSCGSCCKFDEDDSEPVLKGVKLHYT

SEQ ID NO: 235 - protein, 1254 aa, synthetic construct
QCVNLITRTQSYTNSFTRGVYYPDKVFRSSVLHSTQDLFLPFFSNVTWFHAISGTNGTKRFDNPVLPFNDGVYFASTEKSNIIRGWIFGTTLDSKTQSLLIVNNATNVVIKVCEFQFCNDPFLDVYHKNNKSWMESEFRVYSSANNCTFEYVSQPFLMDLEGKQGNFKNLREFVFKNIDGYFKIYSKHTPINLGRDLPQGFSALEPLVDLPIGINITRFQTLLALHRSYLTPGDSSSGWTAGAAAYYVGYLQPRTFLLKYNENGTITDAVDCALDPLSETKCTLKSFTVEKGIYQTSNFRVQPTESIVRFPNITNLCPFDEVFNATTFASVYAWNRKRISNCVADYSVLYNFAPFFAFKCYGVSPTKLNDLCFTNVYADSFVIRGNEVSQIAPGQTGNIADYNYKLPDDFTGCVIAWNSNKLDSKVGGNYNYRYRLFRKSNLKPFERDISTEIYQAGNKPCNGVAGVNCYFPLQSYGFRPTYGVGHQPYRVVVLSFELLHAPATVCGPKKSTNLVKNKCVNFNFNGLTGTGVLTESNKKFLPFQQFGRDIADTTDAVRDPQTLEILDITPCSFGGVSVITPGTNTSNQVAVLYQGVNCTEVPVAIHADQLTPTWRVYSTGSNVFQTRAGCLIGAEYVNNSYECDIPIGAGICASYQTQTKSHQQAQSVASQSIIAYTMSLGAENSVAYSNNSIAIPTNFTISVTTEILPVSMTKTSVDCTMYICGDSTECSNLLLQYGSFCTQLKRALTGIAVEQDKNTQEVFAQVKQIYKTPPIKYFGGFNFSQILPDPSKPSKRSFIEDLLFNKVTLADAGFIKQYGDCLGDIAARDLICAQKFNGLTVLPPLLTDEMIAQYTSALLAGTITSGWTFGAGAALQIPFAMQMAYRFNGIGVTQNVLYENQKLIANQFNSAIGKIQDSLSSTASALGKLQDVVNHNAQALNTLVKQLSSKFGAISSVLNDILSRLDPPEAEVQIDRLITGRLQSLQTYVTQQLIRAAEIRASANLAATKMSECVLGQSKRVDFCGKGYHLMSFPQSAPHGVVFLHVTYVPAQEKNFTTAPAICHDGKAHFPREGVFVSNGTHWFVTQRNFYEPQIITTDNTFVSGNCDVVIGIVNNTVYDPLQPELDSFKEELDKYFKNHTSPDVDLGDISGINASVVNIQKEIDRLNEVAKNLNESLIDLQELGKYEQYIKWPWYIWLGFIAGLIAIVMVTIMLCCMTSCCSCLKGCCSCGSCCKFDEDDSEPVLKGVKLHYT

SEQ ID NO: 236 - protein, 1257 aa, synthetic construct
QCVNLITRTQSYTNSFTRGVYYPDKVFRSSVLHSTQDLFLPFFSNVTWFHAIHVSGTNGTKRFDNPVLPFNDGVYFASTEKSNIIRGWIFGTTLDSKTQSLLIVNNATNVVIKVCEFQFCNDPFLDVYYHXNNKSRMESELRVYSSANNCTFEYVSQPFLMDLEGKQGNFKNLREFVFKNIDGYFKIYSKHTPVNLGRDLPQGFSALEPLVDLPIGINITRFQTLLALHRSYLTPGDSSSSWTAGAAAYYVGYLQPRTFLLKYNENGTITDAVDCALDPLSETKCTLKSFTVEKGIYQTSNFRVQPTESIVRFPNITNLCPFHEVFNATTFASVYAWNRTRISNCVADYSVLYNFAPFFAFKCYGVSPTKLNDLCFTNVYADSFVIRGNEVSQIAPGQTGNIADYNYKLPDDFTGCVIAWNSNKLDSKVSGNYNYLYRLFRKSKLKPFERDISTEIYQAGNKPCNGVAGFNCYSPLQSYGFRPTYGVGHQPYRVVVLSFELLHAPATVCGPKKSTNLVKNKCVNFNFNGLTGTGVLTESNKKFLPFQQFGRDIADTTDAVRDPQTLEILDITPCSFGGVSVITPGTNTSNQVAVLYQGVNCTEVPVAIHADQLTPTWRVYSTGSNVFQTRAGCLIGAEYVNNSYECDIPIGAGICASYQTQTKSHQQAQSVASQSIIAYTMSLGAENSVAYSNNSIAIPTNFTISVTTEILPVSMTKTSVDCTMYICGDSTECSNLLLQYGSFCTQLKRALTGIAVEQDKNTQEVFAQVKQIYKTPPIKYFGGFNFSQILPDPSKPSKRSFIEDLLFNKVTLADAGFIKQYGDCLGDIAARDLICAQKFNGLTVLPPLLTDEMIAQYTSALLAGTITSGWTFGAGAALQIPFAMQMAYRFNGIGVTQNVLYENQKLIANQFNSAIGKIQDSLSSTASALGKLQDVVNHNAQALNTLVKQLSSKFGAISSVLNDILSRLDPPEAEVQIDRLITGRLQSLQTYVTQQLIRAAEIRASANLAATKMSECVLGQSKRVDFCGKGYHLMSFPQSAPHGVVFLHVTYVPAQEKNFTTAPAICHDGKAHFPREGVFVSNGTHWFVTQRNFYEPQIITTDNTFVSGNCDVVIGIVNNTVYDPLQPELDSFKEELDKYFKNHTSPDVDLGDISGINASVVNIQKEIDRLNEVAKNLNESLIDLQELGKYEQYIKWPWYIWLGFIAGLIAIVMVTIMLCCMTSCCSCLKGCCSCGSCCKFDEDDSEPVLKGVKLHYT

SEQ ID NO: 237 - DNA, 3817 bp, synthetic construct
  source 1..3817: mol_type = other DNA
atgttcgtcttcctggtgctgctgcccctggtgtccagccagtgcgtgaacctgaccactaggactcagctgcctcccgcttacaccaactcattcactcgcggtgtgtactaccctgacaaggtcttccgttcttcagtgctgcactcaactcaggacctgttcctgcccttcttctccaacgtcacctggttccacgtcatctccggcaccaacggcactaagcgcttcgacaacccagtgctgcctttcaacgacggtgtctacttcgcttcaatcgagaagtccaacatcatccgtggatggatcttcggcaccactctggacagcaagactcagtctctgctgatcgtcaacaacgccaccaacgtggtcatcaaggtctgcgaattccagttctgcaacgacccattcctggaccacaagaacaacaagtcatggatggagtccgaattccgcgtctactccagcgctaacaactgcactttcgagtacgtgtcccagcctttcctgatggacctggaaggaaagcagggtaacttcaagaacctgagggagttcgtgttcaagaacatcgacggatacttcaagatctacagcaagcacaccccaatcatcgtgcgcgagcccgaggacctgcctcagggtttctctgctctggagccactggtggacctgcctatcggcatcaacatcacccgcttccagactctgctggctctgcaccgttcctacctgactccaggcgactcatcttctggatggactgctggagctgctgcttactacgtgggctacctgcagcctcgcaccttcctgctgaagtacaacgaaaacggaaccatcactgacgccgtcgactgcgctctggaccctctgtcagaaaccaagtgcactctgaagtccttcaccgtggagaagggcatctaccagacttcaaacttcagggtgcagcccaccgaatccatcgtcagattccctaacatcactaacctgtgccccttcgacgaggtcttcaacgccacccgcttcgcttccgtgtacgcctggaacaggaagagaatctcaaactgcgtcgctgactactccgtgctgtacaacctggcccctttcttcaccttcaagtgctacggcgtgtcaccaactaagctgaacgacctgtgcttcaccaacgtctacgccgactccttcgtgatcaggggagacgaggtcagacagatcgctcctggccagactggaaacatcgccgactacaactacaagctgcccgacgacttcaccggttgcgtcatcgcttggaacagcaacaagctggactctaaggtgagcggcaactacaactacctgtaccgcctgttccgtaagtcaaacctgaagccattcgagagggacatcagcactgaaatctaccaggccggaaacaagccttgcaacggtgtcgccggcttcaactgctacttccccctgaggtcctactctttcaggccaacttacggtgtgggccaccagccttacagagtggtcgtgctgagcttcgaactgctccacgctcctgctactgtgtgcggtccaaagaagtctaccaacctggtcaagaacaagtgcgtgaacttcaacttcaacggcctgaaaggaactggtgtcctgaccgagagcaacaagaagttcctgcccttccagcagttcggaagggacatcgctgacaccactgacgctgtgcgcgaccctcagaccctggaaatcctggacatcactccatgctcattcggaggtgtctccgtgatcacccctggcaccaacacttctaaccaggtcgctgtgctgtaccagggcgtcaactgcaccgaggtccctgtggccatccacgctgaccagctgacccccacttggcgcgtgtactccaccggcagcaacgtgttccagactcgtgctggttgcctgatcggcgccgagtacgtgaacaacagctacgaatgcgacatccccatcggcgctggaatctgcgcctcttaccagacccagactaagagccaccagcaggctcagtctgtggcctctcagtcaatcatcgcttacaccatgtcactgggcgctgaaaactccgtggcctactctaacaactcaatcgccatccccaccaacttcactatcagcgtgaccactgagatcctgccagtcagcatgaccaagacttctgtggactgcactatgtacatctgcggagacagcaccgaatgctctaacctgctgctgcagtacggctctttctgcacccagctgaagcgtgctctgactggaatcgccgtggagcaggacaagaacactcaggaagtcttcgctcaggtgaagcaaatctacaagaccccacctatcaagtacttcggcggattcaacttctcccagatcctgcctgacccctccaagccaagcaagcgctctttcatcgaggacctgctgttcaacaaggtcactctggccgacgctggattcatcaagcagtacggagactgcctgggtgacatcgccgctcgtgacctgatctgcgctcagaagttcaagggtctgaccgtgctgcccccactgctgactgacgaaatgatcgcccagtacactagcgccctgctggctggaaccatcacttctggttggaccttcggtgctggcgccgctctgcagatccctttcgctatgcagatggcctaccgtttcaacggaatcggtgtcacccagaacgtgctgtacgagaaccagaagctgatcgctaaccagttcaactcagccatcggaaagatccaggacagcctgagctctactgcctctgctctgggcaagctgcaggacgtcgtgaaccacaacgcccaggctctgaacaccctggtcaagcagctgtcatccaagttcggtgctatcagctctgtgctgaacgacatcttctcccgcctggaccctcccgaggccgaagtgcagatcgaccgcctgatcactggccgtctgcagtcactgcagacctacgtgactcagcagctgatcagggccgctgaaatcagagcctccgctaacctggccgctaccaagatgagcgagtgcgtcctgggtcaatctaagcgtgtggacttctgcggcaagggataccacctgatgtcattccctcagtctgctccccacggtgtggtgttcctgcacgtcacctacgtgccagcccaggagaagaacttcaccactgcccctgctatctgccacgacggcaaggctcacttccccagggaaggtgtcttcgtgagcaacggcacccactggttcgtcactcagagaaacttctacgagccacagatcatcaccactgacaacactttcgtgtctggaaactgcgacgtggtcatcggtatcgtcaacaacaccgtgtacgaccccctgcagccagagctggactcattcaaggaggaactggacaagtacttcaagaaccacacctcccctgacgtcgacctgggcgacatctcaggaatcaacgcttccgtcgtgaacatccagaaggagatcgaccgcctgaacgaagtggccaagaacctgaacgaaagcctgatcgacctgcaggagctgggcaagtacgaacagtacatcaagtggccttggtacatctggctgggtttcatcgctggcctcatcgctatcgtgatggtgaccatcatgctgtgctgcatgacttcatgctgctcctgcctgaagggctgctgcagctgcggatcttgctgcaagttcgacgaggacgactctgaacccgtcctgaagggcgtgaagctgcactacacctaattaa

SEQ ID NO: 238 - DNA, 3804 bp, synthetic construct
  source 1..3804: mol_type = other DNA
atgttcgtcttcctggtgctgctgcctctggtctccagccagtgcgtgaacctgatcaccaggactcagtcctacaccaacagcttcactagaggtgtgtactaccctgacaaggtcttccgctcttcagtgctgcactctactcaggacctgttcctgcccttcttctcaaacgtcacctggttccacgccatctccggcaccaacggcactaagagattcgacaacccagtgctgcctttcaacgacggcgtctacttcgcttctaccgagaagtcaaacatcatccgcggatggatcttcggcaccactctggactccaagactcagagcctgctgatcgtcaacaacgccaccaacgtggtcatcaaggtgtgcgaattccagttctgcaacgacccattcctggacgtgtaccagaagaacaacaagtcttggatggagtcagaattcagagtctactccagcgctaacaactgcactttcgagtacgtgtctcagcctttcctgatggacctggaaggaaaggagggtaacttcaagaacctgcgtgagttcgtcttcaagaacatcgacggttacttcaagatttactctaagcacaccccaatcaacctggagagggacctgcctcagggcttctcagctctggagccactggtggacctgcctatcggcatcaacatcaccaggttccagactctgctggctctgcacagaagctacctgactccaggagactcatcttctggatggactgctggagctgctgcttactacgtgggttacctgcagcctcgcaccttcctgctgaagtacaacgaaaacggcaccatcactgacgccgtcgactgcgctctggaccctctgtctgaaaccaagtgcactctgaagtcattcaccgtggagaagggcatctaccagacttccaacttccgcgtgcagcccaccgaaagcatcgtccgtttccctaacatcactaacctgtgccccttccacgaggtcttcaacgccaccaccttcgcttctgtgtacgcctggaaccgcaagcgtatctctaactgcgtcgccgactactcagtgatctacaacttcgctcccttcttcgccttcaagtgctacggagtgtcaccaactaagctgaacgacctgtgcttcaccaacgtctacgctgactctttcgtgatcaggggtaacgaggtctcacagatcgctccaggccagactggaaacatcgccgactacaactacaagctgcctgacgacttcaccggttgcgtcatcgcttggaactccaacaagctggacagcaagccctctggcaactacaactacctgtacaggctgttcagaaagtccaagctgaagcccttcgagcgtgacatcagcactgaaatctaccaggctggtaacaagccatgcaacggtgtcgccggctccaactgctactctcccctgcagtcctacggcttccgtccaacctacggtgtgggccaccagccttacagggtggtcgtgctgtccttcgaactcctccacgctccagctactgtgtgcggaccaaagaagagcaccaacctggtcaagaacaagtgcgtgaacttcaacttcaacggtctgaccggaactggtgtcctgaccgagtctaacaagaagttcctgcccttccagcagttcggtcgtgacatcgctgacactaccgacgccgtgagggacccccagaccctggaaatcctggacatcactccatgctctttcggaggtgtctcagtgatcactccaggaaccaacacttcaaaccaggtcgctgtgctgtaccagggtgtcaactgcaccgaagtccctgtggccatccacgctgaccagctgacccccacttggagagtgtacagcaccggctctaacgtcttccagactcgcgctggttgcctgatcggcgccgagtacgtgaacaactcttacgaatgcgacatccccatcggcgctggaatctgcgcctcataccagacccagactaagtcccaccagcaggctcagagcgtcgcctcacagtccatcatcgcttacaccatgtctctgggcgctgaaaactcagtggcctactcaaacaactccatcgccatccctaccaacttcactatctccgtgaccactgagatcctgcccgtctccatgaccaagactagcgtggactgcactatgtacatctgcggagactccaccgaatgcagcaacctgctgctgcagtacggtagcttctgcacccagctgaagcgtgctctgactggcatcgccgtggagcaggacaagaacactcaggaagtcttcgctcaggtgaagcaaatctacaagacccctcccatcaagtacttcggcggattcaacttctcccagatcctgcctgaccccagcaagccatctaagagatcattcatcgaggacctgctgttcaacaaggtcactctggccgacgctggtttcatcaagcagtacggagactgcctgggtgacatcgccgctcgcgacctgatctgcgctcagaagttcaacggcctgaccgtgctgccacctctgctgactgacgaaatgatcgcccagtacacttccgccctgctggctggaaccatcacttctggttggaccttcggtgctggtgctgctctgcagatccctttcgctatgcagatggcctacaggttcaacggaatcggtgtcacccagaacgtgctgtacgagaaccagaagctgatcgctaaccagttcaactccgccatcggcaagatccaggactccctgagctctactgccagcgctctgggaaagctgcaggacgtcgtgaaccacaacgcccaggctctgaacaccctggtcaagcagctgtcatccaagttcggagctatcagctctgtgctgaacgacatcctctcccgcctggaccctcctgaggctgaagtccagatcgacaggctgatcactggtagactgcagtctctgcagacctacgtgactcagcagctgatccgcgccgctgaaatccgtgcctcagctaacctggccgctaccaagatgtctgagtgcgtcctgggccagagcaagagggtggacttctgcggcaagggataccacctgatgtctttccctcagtcagctccccacggagtcgtgttcctgcacgtcacctacgtgccagcccaggagaagaacttcaccactgcccctgctatctgccacgacggcaaggctcacttcccccgtgaaggagtcttcgtgtccaacggcacccactggttcgtcactcagaggaacttctacgagccacagatcatcaccactgacaacactttcgtgagcggcaactgcgacgtggtcatcggtatcgtcaacaacaccgtgtacgaccccctgcagccagagctggactccttcaaggaagagctggacaagtacttcaagaaccacaccagcccagacgtcgacctgggcgacatctctggaatcaacgcttcagtcgtgaacatccagaaggagatcgaccgtctgaacgaagtggccaagaacctgaacgaatctctgatcgacctgcaggagctgggaaagtacgaacagtacatcaagtggccttggtacatctggctgggtttcatcgctggcctcatcgctatcgtgatggtgaccatcatgctgtgctgcatgacttcctgctgcagctgcctgaagggctgctgctcttgcggatcatgctgcaagttcgacgaggacgactcagaacccgtcctgaagggcgtgaagctgcactacacctaa

SEQ ID NO: 239 - DNA, 3810 bp, synthetic construct
  source 1..3810: mol_type = other DNA
atgttcgtcttcctggtgctgctgcctctggtctccagccagtgcgtgaacctgatcaccaggactcagtcctacaccaacagcttcactagaggtgtgtactaccctgacaaggtcttccgctcttcagtgctgcactctactcaggacctgttcctgcccttcttctcaaacgtcacctggttccacgccatccacgtgtccggcaccaacggcactaagagattcgacaacccagctctgcctttcaacgacggcgtctacttcgcttctaccgagaagtcaaacatcatccgcggatggatcttcggcaccactctggactccaagactcagagcctgctgatcgtcaacaacgccaccaacgtggtcatcaaggtgtgcgaattccagttctgcaacgacccattcctggacgtgtaccagaagaacaacaagtcttggatggagtcagaattcagagtctactccagcgctaacaactgcactttcgagtacgtgtctcagcctttcctgatggacctggaaggaaaggagggtaacttcaagaacctgcgtgagttcgtcttcaagaacatcgacggttacttcaagatttactctaagcacaccccaatcaacctggagagggacctgcctcagggcttctcagctctggagccactggtggacctgcctatcggcatcaacatcaccaggttccagactctgctggctctgcacagaagctacctgactccagtggactcatcttctggatggactgctggagctgctgcttactacgtgggttacctgcagcctcgcaccttcctgctgaagtacaacgaaaacggcaccatcactgacgccgtcgactgcgctctggaccctctgtctgaaaccaagtgcactctgaagtcattcaccgtggagaagggcatctaccagacttccaacttccgcgtgcagcccaccgaaagcatcgtccgtttccctaacatcactaacctgtgccccttccacgaggtcttcaacgccaccaccttcgcttctgtgtacgcctggaaccgcaagcgtatctctaactgcgtcgccgactactcagtgatctacaacttcgctcccttcttcgccttcaagtgctacggagtgtcaccaactaagctgaacgacctgtgcttcaccaacgtctacgctgactctttcgtgatcaggggtaacgaggtctcacagatcgctccaggccagactggaaacatcgccgactacaactacaagctgcctgacgacttcaccggttgcgtcatcgcttggaactccaacaagctggacagcaagccctctggcaactacaactacctgtacaggctgttcagaaagtccaagctgaagcccttcgagcgtgacatcagcactgaaatctaccaggctggtaacaagccatgcaacggtgtcgccggctccaactgctactctcccctgcagtcctacggcttccgtccaacctacggtgtgggccaccagccttacagggtggtcgtgctgtccttcgaactcctccacgctccagctactgtgtgcggaccaaagaagagcaccaacctggtcaagaacaagtgcgtgaacttcaacttcaacggtctgaccggaactggtgtcctgaccgagtctaacaagaagttcctgcccttccagcagttcggtcgtgacatcgctgacactaccgacgccgtgagggacccccagaccctggaaatcctggacatcactccatgctctttcggaggtgtctcagtgatcactccaggaaccaacacttcaaaccaggtcgctgtgctgtaccagggtgtcaactgcaccgaagtccctgtggccatccacgctgaccagctgacccccacttggagagtgtacagcaccggctctaacgtcttccagactcgcgctggttgcctgatcggcgccgagtacgtgaacaactcttacgaatgcgacatccccatcggcgctggaatctgcgcctcataccagacccagactaagtcccaccagcaggctcagagcgtcgcctcacagtccatcatcgcttacaccatgtctctgggcgctgaaaactcagtggcctactcaaacaactccatcgccatccctaccaacttcactatctccgtgaccactgagatcctgcccgtctccatgaccaagactagcgtggactgcactatgtacatctgcggagactccaccgaatgcagcaacctgctgctgcagtacggtagcttctgcacccagctgaagcgtgctctgactggcatcgccgtggagcaggacaagaacactcaggaagtcttcgctcaggtgaagcaaatctacaagacccctcccatcaagtacttcggcggattcaacttctcccagatcctgcctgaccccagcaagccatctaagagatcattcatcgaggacctgctgttcaacaaggtcactctggccgacgctggtttcatcaagcagtacggagactgcctgggtgacatcgccgctcgcgacctgatctgcgctcagaagttcaacggcctgaccgtgctgccacctctgctgactgacgaaatgatcgcccagtacacttccgccctgctggctggaaccatcacttctggttggaccttcggtgctggtgctgctctgcagatccctttcgctatgcagatggcctacaggttcaacggaatcggtgtcacccagaacgtgctgtacgagaaccagaagctgatcgctaaccagttcaactccgccatcggcaagatccaggactccctgagctctactgccagcgctctgggaaagctgcaggacgtcgtgaaccacaacgcccaggctctgaacaccctggtcaagcagctgtcatccaagttcggagctatcagctctgtgctgaacgacatcctctcccgcctggaccctcctgaggctgaagtccagatcgacaggctgatcactggtagactgcagtctctgcagacctacgtgactcagcagctgatccgcgccgctgaaatccgtgcctcagctaacctggccgctaccaagatgtctgagtgcgtcctgggccagagcaagagggtggacttctgcggcaagggataccacctgatgtctttccctcagtcagctccccacggagtcgtgttcctgcacgtcacctacgtgccagcccaggagaagaacttcaccactgcccctgctatctgccacgacggcaaggctcacttcccccgtgaaggagtcttcgtgtccaacggcacccactggttcgtcactcagaggaacttctacgagccacagatcatcaccactgacaacactttcgtgagcggcaactgcgacgtggtcatcggtatcgtcaacaacaccgtgtacgaccccctgcagccagagctggactccttcaaggaagagctggacaagtacttcaagaaccacaccagcccagacgtcgacctgggcgacatctctggaatcaacgcttcagtcgtgaacatccagaaggagatcgaccgtctgaacgaagtggccaagaacctgaacgaatctctgatcgacctgcaggagctgggaaagtacgaacagtacatcaagtggccttggtacatctggctgggtttcatcgctggcctcatcgctatcgtgatggtgaccatcatgctgtgctgcatgacttcctgctgcagctgcctgaagggctgctgctcttgcggatcatgctgcaagttcgacgaggacgactcagaacccgtcctgaagggcgtgaagctgcactacacctaa

SEQ ID NO: 240 - DNA, 3804 bp, synthetic construct
  source 1..3804: mol_type = other DNA
atgttcgtcttcctggtgctgctgcctctggtctccagccagtgcgtgaacctgatcaccaggactcagtcctacaccaacagcttcactagaggtgtgtactaccctgacaaggtcttccgctcttcagtgctgcactctactcaggacctgttcctgcccttcttctcaaacgtcacctggttccacgccatctccggcaccaacggcactaagagattcgacaacccagtgctgcctttcaacgacggcgtctacttcgcttctaccgagaagtcaaacatcatccgcggatggatcttcggcaccactctggactccaagactcagagcctgctgatcgtcaacaacgccaccaacgtggtcatcaaggtgtgcgaattccagttctgcaacgacccattcctggacgtgtaccacaagaacaacaagtcttggatggagtcagaattcagagtctactccagcgctaacaactgcactttcgagtacgtgtctcagcctttcctgatggacctggaaggaaagcagggtaacttcaagaacctgcgtgagttcgtcttcaagaacatcgacggttacttcaagatttactctaagcacaccccaatcaacctgggtagggacctgcctcagggcttctcagctctggagccactggtggacctgcctatcggcatcaacatcaccaggttccagactctgctggctctgcacagaagctacctgactccaggagactcatcttctggatggactgctggagctgctgcttactacgtgggttacctgcagcctcgcaccttcctgctgaagtacaacgaaaacggcaccatcactgacgccgtcgactgcgctctggaccctctgtctgaaaccaagtgcactctgaagtcattcaccgtggagaagggcatctaccagacttccaacttccgcgtgcagcccaccgaaagcatcgtccgtttccctaacatcactaacctgtgccccttcgacgaggtcttcaacgccaccaccttcgcttctgtgtacgcctggaaccgcaagcgtatctctaactgcgtcgccgactactcagtgctgtacaacttcgctcccttcttcgccttcaagtgctacggagtgtcaccaactaagctgaacgacctgtgcttcaccaacgtctacgctgactctttcgtgatcaggggtaacgaggtctcacagatcgctccaggccagactggaaacatcgccgactacaactacaagctgcctgacgacttcaccggttgcgtcatcgcttggaactccaacaagctggacagcaaagtgggtggcaactacaactaccgttacaggctgttcagaaagtccaacctgaagcccttcgagcgtgacatcagcactgaaatctaccaggctggtaacaagccatgcaacggtgtcgccggcgtcaactgctacttccccctgcagtcctacggcttccgtccaacctacggtgtgggccaccagccttacagggtggtcgtgctgtccttcgaactcctccacgctccagctactgtgtgcggaccaaagaagagcaccaacctggtcaagaacaagtgcgtgaacttcaacttcaacggtctgaccggaactggtgtcctgaccgagtctaacaagaagttcctgcccttccagcagttcggtcgtgacatcgctgacactaccgacgccgtgagggacccccagaccctggaaatcctggacatcactccatgctctttcggaggtgtctcagtgatcactccaggaaccaacacttcaaaccaggtcgctgtgctgtaccagggtgtcaactgcaccgaagtccctgtggccatccacgctgaccagctgacccccacttggagagtgtacagcaccggctctaacgtcttccagactcgcgctggttgcctgatcggcgccgagtacgtgaacaactcttacgaatgcgacatccccatcggcgctggaatctgcgcctcataccagacccagactaagtcccaccagcaggctcagagcgtcgcctcacagtccatcatcgcttacaccatgtctctgggcgctgaaaactcagtggcctactcaaacaactccatcgccatccctaccaacttcactatctccgtgaccactgagatcctgcccgtctccatgaccaagactagcgtggactgcactatgtacatctgcggagactccaccgaatgcagcaacctgctgctgcagtacggtagcttctgcacccagctgaagcgtgctctgactggcatcgccgtggagcaggacaagaacactcaggaagtcttcgctcaggtgaagcaaatctacaagacccctcccatcaagtacttcggcggattcaacttctcccagatcctgcctgaccccagcaagccatctaagagatcattcatcgaggacctgctgttcaacaaggtcactctggccgacgctggtttcatcaagcagtacggagactgcctgggtgacatcgccgctcgcgacctgatctgcgctcagaagttcaacggcctgaccgtgctgccacctctgctgactgacgaaatgatcgcccagtacacttccgccctgctggctggaaccatcacttctggttggaccttcggtgctggtgctgctctgcagatccctttcgctatgcagatggcctacaggttcaacggaatcggtgtcacccagaacgtgctgtacgagaaccagaagctgatcgctaaccagttcaactccgccatcggcaagatccaggactccctgagctctactgccagcgctctgggaaagctgcaggacgtcgtgaaccacaacgcccaggctctgaacaccctggtcaagcagctgtcatccaagttcggagctatcagctctgtgctgaacgacatcctctcccgcctggaccctcctgaggctgaagtccagatcgacaggctgatcactggtagactgcagtctctgcagacctacgtgactcagcagctgatccgcgccgctgaaatccgtgcctcagctaacctggccgctaccaagatgtctgagtgcgtcctgggccagagcaagagggtggacttctgcggcaagggataccacctgatgtctttccctcagtcagctccccacggagtcgtgttcctgcacgtcacctacgtgccagcccaggagaagaacttcaccactgcccctgctatctgccacgacggcaaggctcacttcccccgtgaaggagtcttcgtgtccaacggcacccactggttcgtcactcagaggaacttctacgagccacagatcatcaccactgacaacactttcgtgagcggcaactgcgacgtggtcatcggtatcgtcaacaacaccgtgtacgaccccctgcagccagagctggactccttcaaggaagagctggacaagtacttcaagaaccacaccagcccagacgtcgacctgggcgacatctctggaatcaacgcttcagtcgtgaacatccagaaggagatcgaccgtctgaacgaagtggccaagaacctgaacgaatctctgatcgacctgcaggagctgggaaagtacgaacagtacatcaagtggccttggtacatctggctgggtttcatcgctggcctcatcgctatcgtgatggtgaccatcatgctgtgctgcatgacttcctgctgcagctgcctgaagggctgctgctcttgcggatcatgctgcaagttcgacgaggacgactcagaacccgtcctgaagggcgtgaagctgcactacacctaa

SEQ ID NO: 241 - DNA, 3813 bp, synthetic construct
  source 1..3813: mol_type = other DNA
atgttcgtcttcctggtgctgctgcctctggtctccagccagtgcgtgaacctgatcaccaggactcagtcctacaccaacagcttcactagaggtgtgtactaccctgacaaggtcttccgctcttcagtgctgcactctactcaggacctgttcctgcccttcttctcaaacgtcacctggttccacgccatccacgtgtccggcaccaacggcactaagagattcgacaacccagtgctgcctttcaacgacggcgtctacttcgcttctaccgagaagtcaaacatcatccgcggatggatcttcggcaccactctggactccaagactcagagcctgctgatcgtcaacaacgccaccaacgtggtcatcaaggtgtgcgaattccagttctgcaacgacccattcctggacgtgtactaccacgagaacaacaagtctcgcatggagtcagaattgagagtctactccagcgctaacaactgcactttcgagtacgtgtctcagcctttcctgatggacctggaaggaaagcagggtaacttcaagaacctgcgtgagttcgtcttcaagaacatcgacggttacttcaagatttactctaagcacaccccagtgaacctgggtagggacctgcctcagggcttctcagctctggagccactggtggacctgcctatcggcatcaacatcaccaggttccagactctgctggctctgcacagaagctacctgactccaggagactcatcttctagctggactgctggagctgctgcttactacgtgggttacctgcagcctcgcaccttcctgctgaagtacaacgaaaacggcaccatcactgacgccgtcgactgcgctctggaccctctgtctgaaaccaagtgcactctgaagtcattcaccgtggagaagggcatctaccagacttccaacttccgcgtgcagcccaccgaaagcatcgtccgtttccctaacatcactaacctgtgccccttccacgaggtcttcaacgccaccaccttcgcttctgtgtacgcctggaaccgcacccgtatctctaactgcgtcgccgactactcagtgctgtacaacttcgctcccttcttcgccttcaagtgctacggagtgtcaccaactaagctgaacgacctgtgcttcaccaacgtctacgctgactctttcgtgatcaggggtaacgaggtctcacagatcgctccaggccagactggaaacatcgccgactacaactacaagctgcctgacgacttcaccggttgcgtcatcgcttggaactccaacaagctggacagcaaagtgagcggcaactacaactacttgtacaggctgttcagaaagtccaaactgaagcccttcgagcgtgacatcagcactgaaatctaccaggctggtaacaagccatgcaacggtgtcgccggctttaactgctactctcccctgcagtcctacggcttccgtccaacctacggtgtgggccaccagccttacagggtggtcgtgctgtccttcgaactcctccacgctccagctactgtgtgcggaccaaagaagagcaccaacctggtcaagaacaagtgcgtgaacttcaacttcaacggtctgaccggaactggtgtcctgaccgagtctaacaagaagttcctgcccttccagcagttcggtcgtgacatcgctgacactaccgacgccgtgagggacccccagaccctggaaatcctggacatcactccatgctctttcggaggtgtctcagtgatcactccaggaaccaacacttcaaaccaggtcgctgtgctgtaccagggtgtcaactgcaccgaagtccctgtggccatccacgctgaccagctgacccccacttggagagtgtacagcaccggctctaacgtcttccagactcgcgctggttgcctgatcggcgccgagtacgtgaacaactcttacgaatgcgacatccccatcggcgctggaatctgcgcctcataccagacccagactaagtcccaccagcaggctcagagcgtcgcctcacagtccatcatcgcttacaccatgtctctgggcgctgaaaactcagtggcctactcaaacaactccatcgccatccctaccaacttcactatctccgtgaccactgagatcctgcccgtctccatgaccaagactagcgtggactgcactatgtacatctgcggagactccaccgaatgcagcaacctgctgctgcagtacggtagcttctgcacccagctgaagcgtgctctgactggcatcgccgtggagcaggacaagaacactcaggaagtcttcgctcaggtgaagcaaatctacaagacccctcccatcaagtacttcggcggattcaacttctcccagatcctgcctgaccccagcaagccatctaagagatcattcatcgaggacctgctgttcaacaaggtcactctggccgacgctggtttcatcaagcagtacggagactgcctgggtgacatcgccgctcgcgacctgatctgcgctcagaagttcaacggcctgaccgtgctgccacctctgctgactgacgaaatgatcgcccagtacacttccgccctgctggctggaaccatcacttctggttggaccttcggtgctggtgctgctctgcagatccctttcgctatgcagatggcctacaggttcaacggaatcggtgtcacccagaacgtgctgtacgagaaccagaagctgatcgctaaccagttcaactccgccatcggcaagatccaggactccctgagctctactgccagcgctctgggaaagctgcaggacgtcgtgaaccacaacgcccaggctctgaacaccctggtcaagcagctgtcatccaagttcggagctatcagctctgtgctgaacgacatcctctcccgcctggaccctcctgaggctgaagtccagatcgacaggctgatcactggtagactgcagtctctgcagacctacgtgactcagcagctgatccgcgccgctgaaatccgtgcctcagctaacctggccgctaccaagatgtctgagtgcgtcctgggccagagcaagagggtggacttctgcggcaagggataccacctgatgtctttccctcagtcagctccccacggagtcgtgttcctgcacgtcacctacgtgccagcccaggagaagaacttcaccactgcccctgctatctgccacgacggcaaggctcacttcccccgtgaaggagtcttcgtgtccaacggcacccactggttcgtcactcagaggaacttctacgagccacagatcatcaccactgacaacactttcgtgagcggcaactgcgacgtggtcatcggtatcgtcaacaacaccgtgtacgaccccctgcagccagagctggactccttcaaggaagagctggacaagtacttcaagaaccacaccagcccagacgtcgacctgggcgacatctctggaatcaacgcttcagtcgtgaacatccagaaggagatcgaccgtctgaacgaagtggccaagaacctgaacgaatctctgatcgacctgcaggagctgggaaagtacgaacagtacatcaagtggccttggtacatctggctgggtttcatcgctggcctcatcgctatcgtgatggtgaccatcatgctgtgctgcatgacttcctgctgcagctgcctgaagggctgctgctcttgcggatcatgctgcaagttcgacgaggacgactcagaacccgtcctgaagggcgtgaagctgcactacacctaa

SEQ ID NO: 242 - protein, 1270 aa, synthetic construct; identical to SEQ ID NO: 160

SEQ ID NO: 243 - protein, 1270 aa, synthetic construct; identical to SEQ ID NO: 160

SEQ ID NO: 244 - protein, 1270 aa, synthetic construct; identical to SEQ ID NO: 205

SEQ ID NO: 245 - protein, 1269 aa, synthetic construct
MFVFLVLLPLVSSQCVNLITRTQSYTNSFTRGVYYPDKVFRSSVLHSTQDLFLPFFSNVTWFHAIHVSGTNGTKRFDNPALPFNDGVYFASTEKSNIIRGWIFGTTLDSKTQSLLIVNNATNVVIKVCEFQFCNDPFLDVYQKNNKSWMESEFRVYSSANNCTFEYVSQPFLMDLVGKEGNFKNLREFVFKNIDGYFKIYSKHTPINLERDLPQGFSALEPLVDLPIGINITRFQTLLALHRSYLTPVDSSSGWTAGAAAYYVGYLQPRTFLLKYNENGTITDAVDCALDPLSETKCTLKSFTVEKGIYQTSNFRVQPTESIVRFPNITNLCPFHEVFNATTFASVYAWNRKRISNCVADYSVIYNFAPFFAFKCYGVSPTKLNDLCFTNVYADSFVIRGNEVSQIAPGQTGNIADYNYKLPDDFTGCVIAWNSNKLDSKPSGNYNYLYRLFRKSKLKPFERDISTEIYQAGNRPCNGVAGPNCYSPLQSYGFRPTYGVGHQPYRVVVLSFELLHAPATVCGPKKSTNLVKNKCVNFNFNGLTGTGVLTESNKKFLPFQQFGRDIADTTDAVRDPQTLEILDITPCSFGGVSVITPGTNTSNQVAVLYQGVNCTEVPVAIHADQLTPTWRVYSTGSNVFQTRAGCLIGAEYVNNSYECDIPIGAGICASYQTQTKSHRRARSVASQSIIAYTMSLGAENSVAYSNNSIAIPTNFTISVTTEILPVSMTKTSVDCTMYICGDSTECSNLLLQYGSFCTQLKRALTGIAVEQDKNTQEVFAQVKQIYKTPPIKYFGGFNFSQILPDPSKPSKRSFIEDLLFNKVTLADAGFIKQYGDCLGDIAARDLICAQKFNGLTVLPPLLTDEMIAQYTSALLAGTITSGWTFGAGAALQIPFAMQMAYRFNGIGVTQNVLYENQKLIANQFNSAIGKIQDSLSSTASALGKLQDVVNHNAQALNTLVKQLSSKFGAISSVLNDILSRLDKVEAEVQIDRLITGRLQSLQTYVTQQLIRAAEIRASANLAATKMSECVLGQSKRVDFCGKGYHLMSFPQSAPHGVVFLHVTYVPAQEKNFTTAPAICHDGKAHFPREGVFVSNGTHWFVTQRNFYEPQIITTDNTFVSGNCDVVIGIVNNTVYDPLQPELDSFKEELDKYFKNHTSPDVDLGDISGINASVVNIQKEIDRLNEVAKNLNESLIDLQELGKYEQYIKWPWYIWLGFIAGLIAIVMVTIMLCCMTSCCSCLKGCCSCGSCCKFDEDDSEPVLKGVKLHYT

SEQ ID NO: 246 - protein, 1269 aa, synthetic construct
MFVFLVLLPLVSSQCVNLITRTQSYTNSFTRGVYYPDKVFRSSVLHSTQDLFLPFFSNVTWFHAIHVSGTNGTKRFDNPALPFNDGVYFASTEKSNIIRGWIFGTTLDSKTQSLLIVNNATNVVIKVCEFQFCNDPFLDVYQKNNKSWMESEFRVYSSANNCTFEYVSQPFLMDLVGKEGNFKNLREFVFKNIDGYFKIYSKHTPINLERDLPQGFSALEPLVDLPIGINITRFQTLLALHRSYLTPVDSSSGWTAGAAAYYVGYLQPRTFLLKYNENGTITDAVDCALDPLSETKCTLKSFTVEKGIYQTSNFRVQPTESIVRFPNITNLCPFHEVFNATTFASVYAWNRKRISNCVADYSVIYNFAPFFAFKCYGVSPTKLNDLCFTNVYADSFVIRGNEVSQIAPGQTGNIADYNYKLPDDFTGCVIAWNSNKLDSKPSGNYNYLYRLFRKSKLKPFERDISTEIYQAGNRPCNGVAGPNCYSPLQSYGFRPTYGVGHQPYRVVVLSFELLHASATVCGPKKSTNLVKNKCVNFNFNGLTGTGVLTESNKKFLPFQQFGRDIADTTDAVRDPQTLEILDITPCSFGGVSVITPGTNTSNQVAVLYQGVNCTEVPVAIHADQLTPTWRVYSTGSNVFQTRAGCLIGAEYVNNSYECDIPIGAGICASYQTQTKSHRRARSVASQSIIAYTMSLGAENSVAYSNNSIAIPTNFTISVTTEILPVSMTKTSVDCTMYICGDSTECSNLLLQYGSFCTQLKRALTGIAVEQDKNTQEVFAQVKQIYKTPPIKYFGGFNFSQILPDPSKPSKRSFIEDLLFNKVTLADAGFIKQYGDCLGDIAARDLICAQKFNGLTVLPPLLTDEMIAQYTSALLAGTITSGWTFGAGAALQIPFAMQMAYRFNGIGVTQNVLYENQKLIANQFNSAIGKIQDSLSSTASALGKLQDVVNHNAQALNTLVKQLSSKFGAISSVLNDILSRLDKVEAEVQIDRLITGRLQSLQTYVTQQLIRAAEIRASANLAATKMSECVLGQSKRVDFCGKGYHLMSFPQSAPHGVVFLHVTYVPAQEKNFTTAPAICHDGKAHFPREGVFVSNGTHWFVTQRNFYEPQIITTDNTFVSGNCDVVIGIVNNTVYDPLQPELDSFKEELDKYFKNHTSPDVDLGDISGINASVVNIQKEIDRLNEVAKNLNESLIDLQELGKYEQYIKWPWYIWLGFIAGLIAIVMVTIMLCCMTSCCSCLKGCCSCGSCCKFDEDDSEPVLKGVKLHYT

SEQ ID NO: 247 - protein, 1269 aa, synthetic construct
MFVFLVLLPLVSSQCVNLITRTQSYTNSFTRGVYYPDKVFRSSVLHSTQDLFLPFFSNVTWFHAIHVSGTNGTKRFDNPALPFNDGVYFASTEKSNIIRGWIFGTTLDSKTQSLLIVNNATNVVIKVCEFQFCNDPFLDVYQKNNKSWMESEFRVYSSANNCTFEYVSQPFLMDLVGKEGNFKNLREFVFKNIDGYFKIYSKHTPINLERDLPQGFSALEPLVDLPIGINITRFQTLLALHRSYLTPVDSSSGWTAGAAAYYVGYLQPRTFLLKYNENGTITDAVDCALDPLSETKCTLKSFTVEKGIYQTSNFRVQPTESIVRFPNITNLCPFHEVFNATTFASVYAWNRKRISNCVADYSVIYNFAPFFAFKCYGVSPTKLNDLCFTNVYADSFVIRGNEVSQIAPGQTGNIADYNYKLPDDFTGCVIAWNSNKLDSTPSGNYNYLYRLFRKSKLKPFERDISTEIYQAGNRPCNGVAGPNCYSPLQSYGFRPTYGVGHQPYRVVVLSFELLHAPATVCGPKKSTNLVKNKCVNFNFNGLTGTGVLTESNKKFLPFQQFGRDIADTTDAVRDPQTLEILDITPCSFGGVSVITPGTNTSNQVAVLYQGVNCTEVPVAIHADQLTPTWRVYSTGSNVFQTRAGCLIGAEYVNNSYECDIPIGAGICASYQTQTKSHRRARSVASQSIIAYTMSLGAENSVAYSNNSIAIPTNFTISVTTEILPVSMTKTSVDCTMYICGDSTECSNLLLQYGSFCTQLKRALTGIAVEQDKNTQEVFAQVKQIYKTPPIKYFGGFNFSQILPDPSKPSKRSFIEDLLFNKVTLADAGFIKQYGDCLGDIAARDLICAQKFNGLTVLPPLLTDEMIAQYTSALLAGTITSGWTFGAGAALQIPFAMQMAYRFNGIGVTQNVLYENQKLIANQFNSAIGKIQDSLSSTASALGKLQDVVNHNAQALNTLVKQLSSKFGAISSVLNDILSRLDKVEAEVQIDRLITGRLQSLQTYVTQQLIRAAEIRASANLAATKMSECVLGQSKRVDFCGKGYHLMSFPQSAPHGVVFLHVTYVPAQEKNFTTAPAICHDGKAHFPREGVFVSNGTHWFVTQRNFYEPQIITTDNTFVSGNCDVVIGIVNNTVYDPLQPELDSFKEELDKYFKNHTSPDVDLGDISGINASVVNIQKEIDRLNEVAKNLNESLIDLQELGKYEQYIKWPWYIWLGFIAGLIAIVMVTIMLCCMTSCCSCLKGCCSCGSCCKFDEDDSEPVLKGVKLHYT

SEQ ID NO: 248 - protein, 1269 aa, synthetic construct
MFVFLVLLPLVSSQCVNLITRTQSYTNSFTRGVYYPDKVFRSSVLHSTQDLFLPFFSNVTWFHAIHVSGTNGTKRFDNPALPFNDGVYFASTEKSNIIRGWIFGTTLDSKTQSLLIVNNATNVVIKVCEFQFCNDPFLDVYQKNNKSWMESEFRVYSSANNCTFEYVSQPFLMDLVGKEGNFKNLREFVFKNIDGYFKIYSKHTPINLERDLPQGFSALEPLVDLPIGINITRFQTLLALHRSYLTPVDSSSGWTAGAAAYYVGYLQPRTFLLKYNENGTITDAVDCALDPLSETKCTLKSFTVEKGIYQTSNFRVQPTESIVRFPNITNLCPFHEVFNATTFASVYAWNRKRISNCVADYSVIYNFAPFFAFKCYGVSPTKLNDLCFTNVYADSFVIRGNEVSQIAPGQTGNIADYNYKLPDDFTGCVIAWNSNKLDSKPSGNYNYLYRLFRKSKLKPFERDISTEIYQAGNRPCNGVAGSNCYSPLQSYGFRPTYGVGHQPYRVVVLSFELLHAPATVCGPKKSTNLVKNKCVNFNFNGLTGTGVLTESNKKFLPFQQFGRDIADTTDAVRDPQTLEILDITPCSFGGVSVITPGTNTSNQVAVLYQGVNCTEVPVAIHADQLTPTWRVYSTGSNVFQTRAGCLIGAEYVNNSYECDIPIGAGICASYQTQTKSHRRARSVASQSIIAYTMSLGAENSVAYSNNSIAIPTNFTISVTTEILPVSMTKTSVDCTMYICGDSTECSNLLLQYGSFCTQLKRALTGIAVEQDKNTQEVFAQVKQIYKTPPIKYFGGFNFSQILPDPSKPSKRSFIEDLLFNKVTLADAGFIKQYGDCLGDIAARDLICAQKFNGLTVLPPLLTDEMIAQYTSALLAGTITSGWTFGAGAALQIPFAMQMAYRFNGIGVTQNVLYENQKLIANQFNSAIGKIQDSLSSTASALGKLQDVVNHNAQALNTLVKQLSSKFGAISSVLNDILSRLDKVEAEVQIDRLITGRLQSLQTYVTQQLIRAAEIRASANLAATKMSECVLGQSKRVDFCGKGYHLMSFPQSAPHGVVFLHVTYVPAQEKNFTTAPAICHDGKAHFPREGVFVSNGTHWFVTQRNFYEPQIITTDNTFVSGNCDVVIGIVNNTVYDPLQPELDSFKEELDKYFKNHTSPDVDLGDISGINASVVNIQKEIDRLNEVAKNLNESLIDLQELGKYEQYIKWPWYIWLGFIAGLIAIVMVTIMLCCMTSCCSCLKGCCSCGSCCKFDEDDSEPVLKGVKLHYT

SEQ ID NO: 249 - protein, 1269 aa, synthetic construct
MFVFLVLLPLVSSQCVNLITRTQSYTNSFTRGVYYPDKVFRSSVLHSTQDLFLPFFSNVTWFHAIHVSGTNGTKRFDNPALPFNDGVYFASTEKSNIIRGWIFGTTLDSKTQSLLIVNNATNVVIKVCEFQFCNDPFLDVYQKNNKSWMESEFRVYSSANNCTFEYVSQPFLMDLVGKEGNFKNLREFVFKNIDGYFKIYSKHTPINLERDLPQGFSALEPLVDLPIGINITRFQTLLALHRSYLTPVDSSSGWTAGAAAYYVGYLQPRTFLLKYNENGTITDAVDCALDPLSETKCTLKSFTVEKGIYQTSNFRVQPTESIVRFPNITNLCPFHEVFNATTFASVYAWNRKRISNCVADYSVIYNFAPFFAFKCYGVSPTKLNDLCFTNVYADSFVIRGNEVSQIAPGQTGNIADYNYKLPDDFTGCVIAWNSNKLDSKPSGNYNYLYRLFRKSKLKPFERDISTEIYQAGNKPCNGVAGPNCYSPLQSYGFRPTYGVGHQPYRVVVLSFELLHAPATVCGPKKSTNLVKNKCVNFNFNGLTGTGVLTESNKKFLPFQQFGRDIADTTDAVRDPQTLEILDITPCSFGGVSVITPGTNTSNQVAVLYQGVNCTEVPVAIHADQLTPTWRVYSTGSNVFQTRAGCLIGAEYVNNSYECDIPIGAGICASYQTQTKSHRRARSVASQSIIAYTMSLGAENSVAYSNNSIAIPTNFTISVTTEILPVSMTKTSVDCTMYICGDSTECSNLLLQYGSFCTQLKRALTGIAVEQDKNTQEVFAQVKQIYKTPPIKYFGGFNFSQILPDPSKPSKRSFIEDLLFNKVTLADAGFIKQYGDCLGDIAARDLICAQKFNGLTVLPPLLTDEMIAQYTSALLAGTITSGWTFGAGAALQIPFAMQMAYRFNGIGVTQNVLYENQKLIANQFNSAIGKIQDSLSSTASALGKLQDVVNHNAQALNTLVKQLSSKFGAISSVLNDILSRLDKVEAEVQIDRLITGRLQSLQTYVTQQLIRAAEIRASANLAATKMSECVLGQSKRVDFCGKGYHLMSFPQSAPHGVVFLHVTYVPAQEKNFTTAPAICHDGKAHFPREGVFVSNGTHWFVTQRNFYEPQIITTDNTFVSGNCDVVIGIVNNTVYDPLQPELDSFKEELDKYFKNHTSPDVDLGDISGINASVVNIQKEIDRLNEVAKNLNESLIDLQELGKYEQYIKWPWYIWLGFIAGLIAIVMVTIMLCCMTSCCSCLKGCCSCGSCCKFDEDDSEPVLKGVKLHYT

SEQ ID NO: 250 - protein, 1269 aa, synthetic construct
MFVFLVLLPLVSSQCVNLITRTQSYTNSFTRGVYYPDKVFRSSVLHSTQDLFLPFFSNVTWFHAIHVSGTNGTKRFDNPALPFNDGVYFASTEKSNIIRGWIFGTTLDSKTQSLLIVNNATNVVIKVCEFQFCNDPFLDVYQKNNKSWMESEFRVYSSANNCTFEYVSQPFLMDLVGKEGNFKNLREFVFKNIDGYFKIYSKHTPINLERDLPQGFSALEPLVDLPIGINITRFQTLLALHRSYLTPVDSSSGWTAGAAAYYVGYLQPRTFLLKYNENGTITDAVDCALDPLSETKCTLKSFTVEKGIYQTSNFRVQPTESIVRFPNITNLCPFHEVFNATTFASVYAWNRKRISNCVADYSVIYNFAPFFAFKCYGVSPTKLNDLCFTNVYADSFVIRGNEVSQIAPGQTGNIADYNYKLPDDFTGCVIAWNSNKLDSKPSGNYNYLYRLFRKSKLKPFERDISTEIYQAGNRPCNGVAGPNCYSPLQSYGFRPTYGVGHQPYRVVVLSFELLHAPATVCGPKKSTNLVKNKCVNFNFNGLTGTGVLTESNKKFLPFQQFGRDIADTTDAVRDPQTLEILDITPCSFGGVSVITPGTNTSNQVAVLYQGVNCTEVPVAIHADQLTPTWRVYSTGSNVFQTRAGCLIGAEYVNNSYECDIPIGAGICASYQTQTKSHQQAQSVASQSIIAYTMSLGAENSVAYSNNSIAIPTNFTISVTTEILPVSMTKTSVDCTMYICGDSTECSNLLLQYGSFCTQLKRALTGIAVEQDKNTQEVFAQVKQIYKTPPIKYFGGFNFSQILPDPSKPSKRSFIEDLLFNKVTLADAGFIKQYGDCLGDIAARDLICAQKFNGLTVLPPLLTDEMIAQYTSALLAGTITSGWTFGAGAALQIPFAMQMAYRFNGIGVTQNVLYENQKLIANQFNSAIGKIQDSLSSTASALGKLQDVVNHNAQALNTLVKQLSSKFGAISSVLNDILSRLDPPEAEVQIDRLITGRLQSLQTYVTQQLIRAAEIRASANLAATKMSECVLGQSKRVDFCGKGYHLMSFPQSAPHGVVFLHVTYVPAQEKNFTTAPAICHDGKAHFPREGVFVSNGTHWFVTQRNFYEPQIITTDNTFVSGNCDVVIGIVNNTVYDPLQPELDSFKEELDKYFKNHTSPDVDLGDISGINASVVNIQKEIDRLNEVAKNLNESLIDLQELGKYEQYIKWPWYIWLGFIAGLIAIVMVTIMLCCMTSCCSCLKGCCSCGSCCKFDEDDSEPVLKGVKLHYT

SEQ ID NO: 251 - protein, 1269 aa, synthetic construct
MFVFLVLLPLVSSQCVNLITRTQSYTNSFTRGVYYPDKVFRSSVLHSTQDLFLPFFSNVTWFHAIHVSGTNGTKRFDNPALPFNDGVYFASTEKSNIIRGWIFGTTLDSKTQSLLIVNNATNVVIKVCEFQFCNDPFLDVYQKNNKSWMESEFRVYSSANNCTFEYVSQPFLMDLVGKEGNFKNLREFVFKNIDGYFKIYSKHTPINLERDLPQGFSALEPLVDLPIGINITRFQTLLALHRSYLTPVDSSSGWTAGAAAYYVGYLQPRTFLLKYNENGTITDAVDCALDPLSETKCTLKSFTVEKGIYQTSNFRVQPTESIVRFPNITNLCPFHEVFNATTFASVYAWNRKRISNCVADYSVIYNFAPFFAFKCYGVSPTKLNDLCFTNVYADSFVIRGNEVSQIAPGQTGNIADYNYKLPDDFTGCVIAWNSNKLDSKPSGNYNYLYRLFRKSKLKPFERDISTEIYQAGNRPCNGVAGPNCYSPLQSYGFRPTYGVGHQPYRVVVLSFELLHASATVCGPKKSTNLVKNKCVNFNFNGLTGTGVLTESNKKFLPFQQFGRDIADTTDAVRDPQTLEILDITPCSFGGVSVITPGTNTSNQVAVLYQGVNCTEVPVAIHADQLTPTWRVYSTGSNVFQTRAGCLIGAEYVNNSYECDIPIGAGICASYQTQTKSHQQAQSVASQSIIAYTMSLGAENSVAYSNNSIAIPTNFTISVTTEILPVSMTKTSVDCTMYICGDSTECSNLLLQYGSFCTQLKRALTGIAVEQDKNTQEVFAQVKQIYKTPPIKYFGGFNFSQILPDPSKPSKRSFIEDLLFNKVTLADAGFIKQYGDCLGDIAARDLICAQKFNGLTVLPPLLTDEMIAQYTSALLAGTITSGWTFGAGAALQIPFAMQMAYRFNGIGVTQNVLYENQKLIANQFNSAIGKIQDSLSSTASALGKLQDVVNHNAQALNTLVKQLSSKFGAISSVLNDILSRLDPPEAEVQIDRLITGRLQSLQTYVTQQLIRAAEIRASANLAATKMSECVLGQSKRVDFCGKGYHLMSFPQSAPHGVVFLHVTYVPAQEKNFTTAPAICHDGKAHFPREGVFVSNGTHWFVTQRNFYEPQIITTDNTFVSGNCDVVIGIVNNTVYDPLQPELDSFKEELDKYFKNHTSPDVDLGDISGINASVVNIQKEIDRLNEVAKNLNESLIDLQELGKYEQYIKWPWYIWLGFIAGLIAIVMVTIMLCCMTSCCSCLKGCCSCGSCCKFDEDDSEPVLKGVKLHYT

SEQ ID NO: 252 - protein, 1269 aa, synthetic construct
MFVFLVLLPLVSSQCVNLITRTQSYTNSFTRGVYYPDKVFRSSVLHSTQDLFLPFFSNVTWFHAIHVSGTNGTKRFDNPALPFNDGVYFASTEKSNIIRGWIFGTTLDSKTQSLLIVNNATNVVIKVCEFQFCNDPFLDVYQKNNKSWMESEFRVYSSANNCTFEYVSQPFLMDLVGKEGNFKNLREFVFKNIDGYFKIYSKHTPINLERDLPQGFSALEPLVDLPIGINITRFQTLLALHRSYLTPVDSSSGWTAGAAAYYVGYLQPRTFLLKYNENGTITDAVDCALDPLSETKCTLKSFTVEKGIYQTSNFRVQPTESIVRFPNITNLCPFHEVFNATTFASVYAWNRKRISNCVADYSVIYNFAPFFAFKCYGVSPTKLNDLCFTNVYADSFVIRGNEVSQIAPGQTGNIADYNYKLPDDFTGCVIAWNSNKLDSTPSGNYNYLYRLFRKSKLKPFERDISTEIYQAGNRPCNGVAGPNCYSPLQSYGFRPTYGVGHQPYRVVVLSFELLHAPATVCGPKKSTNLVKNKCVNFNFNGLTGTGVLTESNKKFLPFQQFGRDIADTTDAVRDPQTLEILDITPCSFGGVSVITPGTNTSNQVAVLYQGVNCTEVPVAIHADQLTPTWRVYSTGSNVFQTRAGCLIGAEYVNNSYECDIPIGAGICASYQTQTKSHQQAQSVASQSIIAYTMSLGAENSVAYSNNSIAIPTNFTISVTTEILPVSMTKTSVDCTMYICGDSTECSNLLLQYGSFCTQLKRALTGIAVEQDKNTQEVFAQVKQIYKTPPIKYFGGFNFSQILPDPSKPSKRSFIEDLLFNKVTLADAGFIKQYGDCLGDIAARDLICAQKFNGLTVLPPLLTDEMIAQYTSALLAGTITSGWTFGAGAALQIPFAMQMAYRFNGIGVTQNVLYENQKLIANQFNSAIGKIQDSLSSTASALGKLQDVVNHNAQALNTLVKQLSSKFGAISSVLNDILSRLDPPEAEVQIDRLITGRLQSLQTYVTQQLIRAAEIRASANLAATKMSECVLGQSKRVDFCGKGYHLMSFPQSAPHGVVFLHVTYVPAQEKNFTTAPAICHDGKAHFPREGVFVSNGTHWFVTQRNFYEPQIITTDNTFVSGNCDVVIGIVNNTVYDPLQPELDSFKEELDKYFKNHTSPDVDLGDISGINASVVNIQKEIDRLNEVAKNLNESLIDLQELGKYEQYIKWPWYIWLGFIAGLIAIVMVTIMLCCMTSCCSCLKGCCSCGSCCKFDEDDSEPVLKGVKLHYT

SEQ ID NO: 253 - protein, 1269 aa, synthetic construct
MFVFLVLLPLVSSQCVNLITRTQSYTNSFTRGVYYPDKVFRSSVLHSTQDLFLPFFSNVTWFHAIHVSGTNGTKRFDNPALPFNDGVYFASTEKSNIIRGWIFGTTLDSKTQSLLIVNNATNVVIKVCEFQFCNDPFLDVYQKNNKSWMESEFRVYSSANNCTFEYVSQPFLMDLVGKEGNFKNLREFVFKNIDGYFKIYSKHTPINLERDLPQGFSALEPLVDLPIGINITRFQTLLALHRSYLTPVDSSSGWTAGAAAYYVGYLQPRTFLLKYNENGTITDAVDCALDPLSETKCTLKSFTVEKGIYQTSNFRVQPTESIVRFPNITNLCPFHEVFNATTFASVYAWNRKRISNCVADYSVIYNFAPFFAFKCYGVSPTKLNDLCFTNVYADSFVIRGNEVSQIAPGQTGNIADYNYKLPDDFTGCVIAWNSNKLDSKPSGNYNYLYRLFRKSKLKPFERDISTEIYQAGNRPCNGVAGSNCYSPLQSYGFRPTYGVGHQPYRVVVLSFELLHAPATVCGPKKSTNLVKNKCVNFNFNGLTGTGVLTESNKKFLPFQQFGRDIADTTDAVRDPQTLEILDITPCSFGGVSVITPGTNTSNQVAVLYQGVNCTEVPVAIHADQLTPTWRVYSTGSNVFQTRAGCLIGAEYVNNSYECDIPIGAGICASYQTQTKSHQQAQSVASQSIIAYTMSLGAENSVAYSNNSIAIPTNFTISVTTEILPVSMTKTSVDCTMYICGDSTECSNLLLQYGSFCTQLKRALTGIAVEQDKNTQEVFAQVKQIYKTPPIKYFGGFNFSQILPDPSKPSKRSFIEDLLFNKVTLADAGFIKQYGDCLGDIAARDLICAQKFNGLTVLPPLLTDEMIAQYTSALLAGTITSGWTFGAGAALQIPFAMQMAYRFNGIGVTQNVLYENQKLIANQFNSAIGKIQDSLSSTASALGKLQDVVNHNAQALNTLVKQLSSKFGAISSVLNDILSRLDPPEAEVQIDRLITGRLQSLQTYVTQQLIRAAEIRASANLAATKMSECVLGQSKRVDFCGKGYHLMSFPQSAPHGVVFLHVTYVPAQEKNFTTAPAICHDGKAHFPREGVFVSNGTHWFVTQRNFYEPQIITTDNTFVSGNCDVVIGIVNNTVYDPLQPELDSFKEELDKYFKNHTSPDVDLGDISGINASVVNIQKEIDRLNEVAKNLNESLIDLQELGKYEQYIKWPWYIWLGFIAGLIAIVMVTIMLCCMTSCCSCLKGCCSCGSCCKFDEDDSEPVLKGVKLHYT

SEQ ID NO: 254 - protein, 1269 aa, synthetic construct
MFVFLVLLPLVSSQCVNLITRTQSYTNSFTRGVYYPDKVFRSSVLHSTQDLFLPFFSNVTWFHAIHVSGTNGTKRFDNPALPFNDGVYFASTEKSNIIRGWIFGTTLDSKTQSLLIVNNATNVVIKVCEFQFCNDPFLDVYQKNNKSWMESEFRVYSSANNCTFEYVSQPFLMDLVGKEGNFKNLREFVFKNIDGYFKIYSKHTPINLERDLPQGFSALEPLVDLPIGINITRFQTLLALHRSYLTPVDSSSGWTAGAAAYYVGYLQPRTFLLKYNENGTITDAVDCALDPLSETKCTLKSFTVEKGIYQTSNFRVQPTESIVRFPNITNLCPFHEVFNATTFASVYAWNRKRISNCVADYSVIYNFAPFFAFKCYGVSPTKLNDLCFTNVYADSFVIRGNEVSQIAPGQTGNIADYNYKLPDDFTGCVIAWNSNKLDSKPSGNYNYLYRLFRKSKLKPFERDISTEIYQAGNKPCNGVAGPNCYSPLQSYGFRPTYGVGHQPYRVVVLSFELLHAPATVCGPKKSTNLVKNKCVNFNFNGLTGTGVLTESNKKFLPFQQFGRDIADTTDAVRDPQTLEILDITPCSFGGVSVITPGTNTSNQVAVLYQGVNCTEVPVAIHADQLTPTWRVYSTGSNVFQTRAGCLIGAEYVNNSYECDIPIGAGICASYQTQTKSHQQAQSVASQSIIAYTMSLGAENSVAYSNNSIAIPTNFTISVTTEILPVSMTKTSVDCTMYICGDSTECSNLLLQYGSFCTQLKRALTGIAVEQDKNTQEVFAQVKQIYKTPPIKYFGGFNFSQILPDPSKPSKRSFIEDLLFNKVTLADAGFIKQYGDCLGDIAARDLICAQKFNGLTVLPPLLTDEMIAQYTSALLAGTITSGWTFGAGAALQIPFAMQMAYRFNGIGVTQNVLYENQKLIANQFNSAIGKIQDSLSSTASALGKLQDVVNHNAQALNTLVKQLSSKFGAISSVLNDILSRLDPPEAEVQIDRLITGRLQSLQTYVTQQLIRAAEIRASANLAATKMSECVLGQSKRVDFCGKGYHLMSFPQSAPHGVVFLHVTYVPAQEKNFTTAPAICHDGKAHFPREGVFVSNGTHWFVTQRNFYEPQIITTDNTFVSGNCDVVIGIVNNTVYDPLQPELDSFKEELDKYFKNHTSPDVDLGDISGINASVVNIQKEIDRLNEVAKNLNESLIDLQELGKYEQYIKWPWYIWLGFIAGLIAIVMVTIMLCCMTSCCSCLKGCCSCGSCCKFDEDDSEPVLKGVKLHYT

SEQ ID NO: 255 - protein, 1256 aa, synthetic construct
QCVNLITRTQSYTNSFTRGVYYPDKVFRSSVLHSTQDLFLPFFSNVTWFHAIHVSGTNGTKRFDNPALPFNDGVYFASTEKSNIIRGWIFGTTLDSKTQSLLIVNNATNVVIKVCEFQFCNDPFLDVYQKNNKSWMESEFRVYSSANNCTFEYVSQPFLMDLVGKEGNFKNLREFVFKNIDGYFKIYSKHTPINLERDLPQGFSALEPLVDLPIGINITRFQTLLALHRSYLTPVDSSSGWTAGAAAYYVGYLQPRTFLLKYNENGTITDAVDCALDPLSETKCTLKSFTVEKGIYQTSNFRVQPTESIVRFPNITNLCPFHEVFNATTFASVYAWNRKRISNCVADYSVIYNFAPFFAFKCYGVSPTKLNDLCFTNVYADSFVIRGNEVSQIAPGQTGNIADYNYKLPDDFTGCVIAWNSNKLDSKPSGNYNYLYRLFRKSKLKPFERDISTEIYQAGNRPCNGVAGPNCYSPLQSYGFRPTYGVGHQPYRVVVLSFELLHAPATVCGPKKSTNLVKNKCVNFNFNGLTGTGVLTESNKKFLPFQQFGRDIADTTDAVRDPQTLEILDITPCSFGGVSVITPGTNTSNQVAVLYQGVNCTEVPVAIHADQLTPTWRVYSTGSNVFQTRAGCLIGAEYVNNSYECDIPIGAGICASYQTQTKSHRRARSVASQSIIAYTMSLGAENSVAYSNNSIAIPTNFTISVTTEILPVSMTKTSVDCTMYICGDSTECSNLLLQYGSFCTQLKRALTGIAVEQDKNTQEVFAQVKQIYKTPPIKYFGGFNFSQILPDPSKPSKRSFIEDLLFNKVTLADAGFIKQYGDCLGDIAARDLICAQKFNGLTVLPPLLTDEMIAQYTSALLAGTITSGWTFGAGAALQIPFAMQMAYRFNGIGVTQNVLYENQKLIANQFNSAIGKIQDSLSSTASALGKLQDVVNHNAQALNTLVKQLSSKFGAISSVLNDILSRLDKVEAEVQIDRLITGRLQSLQTYVTQQLIRAAEIRASANLAATKMSECVLGQSKRVDFCGKGYHLMSFPQSAPHGVVFLHVTYVPAQEKNFTTAPAICHDGKAHFPREGVFVSNGTHWFVTQRNFYEPQIITTDNTFVSGNCDVVIGIVNNTVYDPLQPELDSFKEELDKYFKNHTSPDVDLGDISGINASVVNIQKEIDRLNEVAKNLNESLIDLQELGKYEQYIKWPWYIWLGFIAGLIAIVMVTIMLCCMTSCCSCLKGCCSCGSCCKFDEDDSEPVLKGVKLHYT

SEQ ID NO: 256 - protein, 1256 aa, synthetic construct
QCVNLITRTQSYTNSFTRGVYYPDKVFRSSVLHSTQDLFLPFFSNVTWFHAIHVSGTNGTKRFDNPALPFNDGVYFASTEKSNIIRGWIFGTTLDSKTQSLLIVNNATNVVIKVCEFQFCNDPFLDVYQKNNKSWMESEFRVYSSANNCTFEYVSQPFLMDLVGKEGNFKNLREFVFKNIDGYFKIYSKHTPINLERDLPQGFSALEPLVDLPIGINITRFQTLLALHRSYLTPVDSSSGWTAGAAAYYVGYLQPRTFLLKYNENGTITDAVDCALDPLSETKCTLKSFTVEKGIYQTSNFRVQPTESIVRFPNITNLCPFHEVFNATTFASVYAWNRKRISNCVADYSVIYNFAPFFAFKCYGVSPTKLNDLCFTNVYADSFVIRGNEVSQIAPGQTGNIADYNYKLPDDFTGCVIAWNSNKLDSKPSGNYNYLYRLFRKSKLKPFERDISTEIYQAGNRPCNGVAGPNCYSPLQSYGFRPTYGVGHQPYRVVVLSFELLHASATVCGPKKSTNLVKNKCVNFNFNGLTGTGVLTESNKKFLPFQQFGRDIADTTDAVRDPQTLEILDITPCSFGGVSVITPGTNTSNQVAVLYQGVNCTEVPVAIHADQLTPTWRVYSTGSNVFQTRAGCLIGAEYVNNSYECDIPIGAGICASYQTQTKSHRRARSVASQSIIAYTMSLGAENSVAYSNNSIAIPTNFTISVTTEILPVSMTKTSVDCTMYICGDSTECSNLLLQYGSFCTQLKRALTGIAVEQDKNTQEVFAQVKQIYKTPPIKYFGGFNFSQILPDPSKPSKRSFIEDLLFNKVTLADAGFIKQYGDCLGDIAARDLICAQKFNGLTVLPPLLTDEMIAQYTSALLAGTITSGWTFGAGAALQIPFAMQMAYRFNGIGVTQNVLYENQKLIANQFNSAIGKIQDSLSSTASALGKLQDVVNHNAQALNTLVKQLSSKFGAISSVLNDILSRLDKVEAEVQIDRLITGRLQSLQTYVTQQLIRAAEIRASANLAATKMSECVLGQSKRVDFCGKGYHLMSFPQSAPHGVVFLHVTYVPAQEKNFTTAPAICHDGKAHFPREGVFVSNGTHWFVTQRNFYEPQIITTDNTFVSGNCDVVIGIVNNTVYDPLQPELDSFKEELDKYFKNHTSPDVDLGDISGINASVVNIQKEIDRLNEVAKNLNESLIDLQELGKYEQYIKWPWYIWLGFIAGLIAIVMVTIMLCCMTSCCSCLKGCCSCGSCCKFDEDDSEPVLKGVKLHYT

SEQ ID NO: 257 - protein, 1256 aa, synthetic construct
QCVNLITRTQSYTNSFTRGVYYPDKVFRSSVLHSTQDLFLPFFSNVTWFHAIHVSGTNGTKRFDNPALPFNDGVYFASTEKSNIIRGWIFGTTLDSKTQSLLIVNNATNVVIKVCEFQFCNDPFLDVYQKNNKSWMESEFRVYSSANNCTFEYVSQPFLMDLVGKEGNFKNLREFVFKNIDGYFKIYSKHTPINLERDLPQGFSALEPLVDLPIGINITRFQTLLALHRSYLTPVDSSSGWTAGAAAYYVGYLQPRTFLLKYNENGTITDAVDCALDPLSETKCTLKSFTVEKGIYQTSNFRVQPTESIVRFPNITNLCPFHEVFNATTFASVYAWNRKRISNCVADYSVIYNFAPFFAFKCYGVSPTKLNDLCFTNVYADSFVIRGNEVSQIAPGQTGNIADYNYKLPDDFTGCVIAWNSNKLDSTPSGNYNYLYRLFRKSKLKPFERDISTEIYQAGNRPCNGVAGPNCYSPLQSYGFRPTYGVGHQPYRVVVLSFELLHAPATVCGPKKSTNLVKNKCVNFNFNGLTGTGVLTESNKKFLPFQQFGRDIADTTDAVRDPQTLEILDITPCSFGGVSVITPGTNTSNQVAVLYQGVNCTEVPVAIHADQLTPTWRVYSTGSNVFQTRAGCLIGAEYVNNSYECDIPIGAGICASYQTQTKSHRRARSVASQSIIAYTMSLGAENSVAYSNNSIAIPTNFTISVTTEILPVSMTKTSVDCTMYICGDSTECSNLLLQYGSFCTQLKRALTGIAVEQDKNTQEVFAQVKQIYKTPPIKYFGGFNFSQILPDPSKPSKRSFIEDLLFNKVTLADAGFIKQYGDCLGDIAARDLICAQKFNGLTVLPPLLTDEMIAQYTSALLAGTITSGWTFGAGAALQIPFAMQMAYRFNGIGVTQNVLYENQKLIANQFNSAIGKIQDSLSSTASALGKLQDVVNHNAQALNTLVKQLSSKFGAISSVLNDILSRLDKVEAEVQIDRLITGRLQSLQTYVTQQLIRAAEIRASANLAATKMSECVLGQSKRVDFCGKGYHLMSFPQSAPHGVVFLHVTYVPAQEKNFTTAPAICHDGKAHFPREGVFVSNGTHWFVTQRNFYEPQIITTDNTFVSGNCDVVIGIVNNTVYDPLQPELDSFKEELDKYFKNHTSPDVDLGDISGINASVVNIQKEIDRLNEVAKNLNESLIDLQELGKYEQYIKWPWYIWLGFIAGLIAIVMVTIMLCCMTSCCSCLKGCCSCGSCCKFDEDDSEPVLKGVKLHYT

SEQ ID NO: 258 - protein, 1256 aa, synthetic construct
QCVNLITRTQSYTNSFTRGVYYPDKVFRSSVLHSTQDLFLPFFSNVTWFHAIHVSGTNGTKRFDNPALPFNDGVYFASTEKSNIIRGWIFGTTLDSKTQSLLIVNNATNVVIKVCEFQFCNDPFLDVYQKNNKSWMESEFRVYSSANNCTFEYVSQPFLMDLVGKEGNFKNLREFVFKNIDGYFKIYSKHTPINLERDLPQGFSALEPLVDLPIGINITRFQTLLALHRSYLTPVDSSSGWTAGAAAYYVGYLQPRTFLLKYNENGTITDAVDCALDPLSETKCTLKSFTVEKGIYQTSNFRVQPTESIVRFPNITNLCPFHEVFNATTFASVYAWNRKRISNCVADYSVIYNFAPFFAFKCYGVSPTKLNDLCFTNVYADSFVIRGNEVSQIAPGQTGNIADYNYKLPDDFTGCVIAWNSNKLDSKPSGNYNYLYRLFRKSKLKPFERDISTEIYQAGNRPCNGVAGSNCYSPLQSYGFRPTYGVGHQPYRVVVLSFELLHAPATVCGPKKSTNLVKNKCVNFNFNGLTGTGVLTESNKKFLPFQQFGRDIADTTDAVRDPQTLEILDITPCSFGGVSVITPGTNTSNQVAVLYQGVNCTEVPVAIHADQLTPTWRVYSTGSNVFQTRAGCLIGAEYVNNSYECDIPIGAGICASYQTQTKSHRRARSVASQSIIAYTMSLGAENSVAYSNNSIAIPTNFTISVTTEILPVSMTKTSVDCTMYICGDSTECSNLLLQYGSFCTQLKRALTGIAVEQDKNTQEVFAQVKQIYKTPPIKYFGGFNFSQILPDPSKPSKRSFIEDLLFNKVTLADAGFIKQYGDCLGDIAARDLICAQKFNGLTVLPPLLTDEMIAQYTSALLAGTITSGWTFGAGAALQIPFAMQMAYRFNGIGVTQNVLYENQKLIANQFNSAIGKIQDSLSSTASALGKLQDVVNHNAQALNTLVKQLSSKFGAISSVLNDILSRLDKVEAEVQIDRLITGRLQSLQTYVTQQLIRAAEIRASANLAATKMSECVLGQSKRVDFCGKGYHLMSFPQSAPHGVVFLHVTYVPAQEKNFTTAPAICHDGKAHFPREGVFVSNGTHWFVTQRNFYEPQIITTDNTFVSGNCDVVIGIVNNTVYDPLQPELDSFKEELDKYFKNHTSPDVDLGDISGINASVVNIQKEIDRLNEVAKNLNESLIDLQELGKYEQYIKWPWYIWLGFIAGLIAIVMVTIMLCCMTSCCSCLKGCCSCGSCCKFDEDDSEPVLKGVKLHYT

SEQ ID NO: 259 - protein, 1256 aa, synthetic construct
QCVNLITRTQSYTNSFTRGVYYPDKVFRSSVLHSTQDLFLPFFSNVTWFHAIHVSGTNGTKRFDNPALPFNDGVYFASTEKSNIIRGWIFGTTLDSKTQSLLIVNNATNVVIKVCEFQFCNDPFLDVYQKNNKSWMESEFRVYSSANNCTFEYVSQPFLMDLVGKEGNFKNLREFVFKNIDGYFKIYSKHTPINLERDLPQGFSALEPLVDLPIGINITRFQTLLALHRSYLTPVDSSSGWTAGAAAYYVGYLQPRTFLLKYNENGTITDAVDCALDPLSETKCTLKSFTVEKGIYQTSNFRVQPTESIVRFPNITNLCPFHEVFNATTFASVYAWNRKRISNCVADYSVIYNFAPFFAFKCYGVSPTKLNDLCFTNVYADSFVIRGNEVSQIAPGQTGNIADYNYKLPDDFTGCVIAWNSNKLDSKPSGNYNYLYRLFRKSKLKPFERDISTEIYQAGNKPCNGVAGPNCYSPLQSYGFRPTYGVGHQPYRVVVLSFELLHAPATVCGPKKSTNLVKNKCVNFNFNGLTGTGVLTESNKKFLPFQQFGRDIADTTDAVRDPQTLEILDITPCSFGGVSVITPGTNTSNQVAVLYQGVNCTEVPVAIHADQLTPTWRVYSTGSNVFQTRAGCLIGAEYVNNSYECDIPIGAGICASYQTQTKSHRRARSVASQSIIAYTMSLGAENSVAYSNNSIAIPTNFTISVTTEILPVSMTKTSVDCTMYICGDSTECSNLLLQYGSFCTQLKRALTGIAVEQDKNTQEVFAQVKQIYKTPPIKYFGGFNFSQILPDPSKPSKRSFIEDLLFNKVTLADAGFIKQYGDCLGDIAARDLICAQKFNGLTVLPPLLTDEMIAQYTSALLAGTITSGWTFGAGAALQIPFAMQMAYRFNGIGVTQNVLYENQKLIANQFNSAIGKIQDSLSSTASALGKLQDVVNHNAQALNTLVKQLSSKFGAISSVLNDILSRLDKVEAEVQIDRLITGRLQSLQTYVTQQLIRAAEIRASANLAATKMSECVLGQSKRVDFCGKGYHLMSFPQSAPHGVVFLHVTYVPAQEKNFTTAPAICHDGKAHFPREGVFVSNGTHWFVTQRNFYEPQIITTDNTFVSGNCDVVIGIVNNTVYDPLQPELDSFKEELDKYFKNHTSPDVDLGDISGINASVVNIQKEIDRLNEVAKNLNESLIDLQELGKYEQYIKWPWYIWLGFIAGLIAIVMVTIMLCCMTSCCSCLKGCCSCGSCCKFDEDDSEPVLKGVKLHYT

SEQ ID NO: 260 - protein, 1256 aa, synthetic construct
QCVNLITRTQSYTNSFTRGVYYPDKVFRSSVLHSTQDLFLPFFSNVTWFHAIHVSGTNGTKRFDNPALPFNDGVYFASTEKSNIIRGWIFGTTLDSKTQSLLIVNNATNVVIKVCEFQFCNDPFLDVYQKNNKSWMESEFRVYSSANNCTFEYVSQPFLMDLVGKEGNFKNLREFVFKNIDGYFKIYSKHTPINLERDLPQGFSALEPLVDLPIGINITRFQTLLALHRSYLTPVDSSSGWTAGAAAYYVGYLQPRTFLLKYNENGTITDAVDCALDPLSETKCTLKSFTVEKGIYQTSNFRVQPTESIVRFPNITNLCPFHEVFNATTFASVYAWNRKRISNCVADYSVIYNFAPFFAFKCYGVSPTKLNDLCFTNVYADSFVIRGNEVSQIAPGQTGNIADYNYKLPDDFTGCVIAWNSNKLDSKPSGNYNYLYRLFRKSKLKPFERDISTEIYQAGNRPCNGVAGPNCYSPLQSYGFRPTYGVGHQPYRVVVLSFELLHAPATVCGPKKSTNLVKNKCVNFNFNGLTGTGVLTESNKKFLPFQQFGRDIADTTDAVRDPQTLEILDITPCSFGGVSVITPGTNTSNQVAVLYQGVNCTEVPVAIHADQLTPTWRVYSTGSNVFQTRAGCLIGAEYVNNSYECDIPIGAGICASYQTQTKSHQQAQSVASQSIIAYTMSLGAENSVAYSNNSIAIPTNFTISVTTEILPVSMTKTSVDCTMYICGDSTECSNLLLQYGSFCTQLKRALTGIAVEQDKNTQEVFAQVKQIYKTPPIKYFGGFNFSQILPDPSKPSKRSFIEDLLFNKVTLADAGFIKQYGDCLGDIAARDLICAQKFNGLTVLPPLLTDEMIAQYTSALLAGTITSGWTFGAGAALQIPFAMQMAYRFNGIGVTQNVLYENQKLIANQFNSAIGKIQDSLSSTASALGKLQDVVNHNAQALNTLVKQLSSKFGAISSVLNDILSRLDPPEAEVQIDRLITGRLQSLQTYVTQQLIRAAEIRASANLAATKMSECVLGQSKRVDFCGKGYHLMSFPQSAPHGVVFLHVTYVPAQEKNFTTAPAICHDGKAHFPREGVFVSNGTHWFVTQRNFYEPQIITTDNTFVSGNCDVVIGIVNNTVYDPLQPELDSFKEELDKYFKNHTSPDVDLGDISGINASVVNIQKEIDRLNEVAKNLNESLIDLQELGKYEQYIKWPWYIWLGFIAGLIAIVMVTIMLCCMTSCCSCLKGCCSCGSCCKFDEDDSEPVLKGVKLHYT

SEQ ID NO: 261 - protein, 1256 aa, synthetic construct
QCVNLITRTQSYTNSFTRGVYYPDKVFRSSVLHSTQDLFLPFFSNVTWFHAIHVSGTNGTKRFDNPALPFNDGVYFASTEKSNIIRGWIFGTTLDSKTQSLLIVNNATNVVIKVCEFQFCNDPFLDVYQKNNKSWMESEFRVYSSANNCTFEYVSQPFLMDLVGKEGNFKNLREFVFKNIDGYFKIYSKHTPINLERDLPQGFSALEPLVDLPIGINITRFQTLLALHRSYLTPVDSSSGWTAGAAAYYVGYLQPRTFLLKYNENGTITDAVDCALDPLSETKCTLKSFTVEKGIYQTSNFRVQPTESIVRFPNITNLCPFHEVFNATTFASVYAWNRKRISNCVADYSVIYNFAPFFAFKCYGVSPTKLNDLCFTNVYADSFVIRGNEVSQIAPGQTGNIADYNYKLPDDFTGCVIAWNSNKLDSKPSGNYNYLYRLFRKSKLKPFERDISTEIYQAGNRPCNGVAGPNCYSPLQSYGFRPTYGVGHQPYRVVVLSFELLHASATVCGPKKSTNLVKNKCVNFNFNGLTGTGVLTESNKKFLPFQQFGRDIADTTDAVRDPQTLEILDITPCSFGGVSVITPGTNTSNQVAVLYQGVNCTEVPVAIHADQLTPTWRVYSTGSNVFQTRAGCLIGAEYVNNSYECDIPIGAGICASYQTQTKSHQQAQSVASQSIIAYTMSLGAENSVAYSNNSIAIPTNFTISVTTEILPVSMTKTSVDCTMYICGDSTECSNLLLQYGSFCTQLKRALTGIAVEQDKNTQEVFAQVKQIYKTPPIKYFGGFNFSQILPDPSKPSKRSFIEDLLFNKVTLADAGFIKQYGDCLGDIAARDLICAQKFNGLTVLPPLLTDEMIAQYTSALLAGTITSGWTFGAGAALQIPFAMQMAYRFNGIGVTQNVLYENQKLIANQFNSAIGKIQDSLSSTASALGKLQDVVNHNAQALNTLVKQLSSKFGAISSVLNDILSRLDPPEAEVQIDRLITGRLQSLQTYVTQQLIRAAEIRASANLAATKMSECVLGQSKRVDFCGKGYHLMSFPQSAPHGVVFLHVTYVPAQEKNFTTAPAICHDGKAHFPREGVFVSNGTHWFVTQRNFYEPQIITTDNTFVSGNCDVVIGIVNNTVYDPLQPELDSFKEELDKYFKNHTSPDVDLGDISGINASVVNIQKEIDRLNEVAKNLNESLIDLQELGKYEQYIKWPWYIWLGFIAGLIAIVMVTIMLCCMTSCCSCLKGCCSCGSCCKFDEDDSEPVLKGVKLHYT

SEQ ID NO: 262 - protein, 1256 aa, synthetic construct
QCVNLITRTQSYTNSFTRGVYYPDKVFRSSVLHSTQDLFLPFFSNVTWFHAIHVSGTNGTKRFDNPALPFNDGVYFASTEKSNIIRGWIFGTTLDSKTQSLLIVNNATNVVIKVCEFQFCNDPFLDVYQKNNKSWMESEFRVYSSANNCTFEYVSQPFLMDLVGKEGNFKNLREFVFKNIDGYFKIYSKHTPINLERDLPQGFSALEPLVDLPIGINITRFQTLLALHRSYLTPVDSSSGWTAGAAAYYVGYLQPRTFLLKYNENGTITDAVDCALDPLSETKCTLKSFTVEKGIYQTSNFRVQPTESIVRFPNITNLCPFHEVFNATTFASVYAWNRKRISNCVADYSVIYNFAPFFAFKCYGVSPTKLNDLCFTNVYADSFVIRGNEVSQIAPGQTGNIADYNYKLPDDFTGCVIAWNSNKLDSTPSGNYNYLYRLFRKSKLKPFERDISTEIYQAGNRPCNGVAGPNCYSPLQSYGFRPTYGVGHQPYRVVVLSFELLHAPATVCGPKKSTNLVKNKCVNFNFNGLTGTGVLTESNKKFLPFQQFGRDIADTTDAVRDPQTLEILDITPCSFGGVSVITPGTNTSNQVAVLYQGVNCTEVPVAIHADQLTPTWRVYSTGSNVFQTRAGCLIGAEYVNNSYECDIPIGAGICASYQTQTKSHQQAQSVASQSIIAYTMSLGAENSVAYSNNSIAIPTNFTISVTTEILPVSMTKTSVDCTMYICGDSTECSNLLLQYGSFCTQLKRALTGIAVEQDKNTQEVFAQVKQIYKTPPIKYFGGFNFSQILPDPSKPSKRSFIEDLLFNKVTLADAGFIKQYGDCLGDIAARDLICAQKFNGLTVLPPLLTDEMIAQYTSALLAGTITSGWTFGAGAALQIPFAMQMAYRFNGIGVTQNVLYENQKLIANQFNSAIGKIQDSLSSTASALGKLQDVVNHNAQALNTLVKQLSSKFGAISSVLNDILSRLDPPEAEVQIDRLITGRLQSLQTYVTQQLIRAAEIRASANLAATKMSECVLGQSKRVDFCGKGYHLMSFPQSAPHGVVFLHVTYVPAQEKNFTTAPAICHDGKAHFPREGVFVSNGTHWFVTQRNFYEPQIITTDNTFVSGNCDVVIGIVNNTVYDPLQPELDSFKEELDKYFKNHTSPDVDLGDISGINASVVNIQKEIDRLNEVAKNLNESLIDLQELGKYEQYIKWPWYIWLGFIAGLIAIVMVTIMLCCMTSCCSCLKGCCSCGSCCKFDEDDSEPVLKGVKLHYT

SEQ ID NO: 263 - protein, 1256 aa, synthetic construct
QCVNLITRTQSYTNSFTRGVYYPDKVFRSSVLHSTQDLFLPFFSNVTWFHAIHVSGTNGTKRFDNPALPFNDGVYFASTEKSNIIRGWIFGTTLDSKTQSLLIVNNATNVVIKVCEFQFCNDPFLDVYQKNNKSWMESEFRVYSSANNCTFEYVSQPFLMDLVGKEGNFKNLREFVFKNIDGYFKIYSKHTPINLERDLPQGFSALEPLVDLPIGINITRFQTLLALHRSYLTPVDSSSGWTAGAAAYYVGYLQPRTFLLKYNENGTITDAVDCALDPLSETKCTLKSFTVEKGIYQTSNFRVQPTESIVRFPNITNLCPFHEVFNATTFASVYAWNRKRISNCVADYSVIYNFAPFFAFKCYGVSPTKLNDLCFTNVYADSFVIRGNEVSQIAPGQTGNIADYNYKLPDDFTGCVIAWNSNKLDSKPSGNYNYLYRLFRKSKLKPFERDISTEIYQAGNRPCNGVAGSNCYSPLQSYGFRPTYGVGHQPYRVVVLSFELLHAPATVCGPKKSTNLVKNKCVNFNFNGLTGTGVLTESNKKFLPFQQFGRDIADTTDAVRDPQTLEILDITPCSFGGVSVITPGTNTSNQVAVLYQGVNCTEVPVAIHADQLTPTWRVYSTGSNVFQTRAGCLIGAEYVNNSYECDIPIGAGICASYQTQTKSHQQAQSVASQSIIAYTMSLGAENSVAYSNNSIAIPTNFTISVTTEILPVSMTKTSVDCTMYICGDSTECSNLLLQYGSFCTQLKRALTGIAVEQDKNTQEVFAQVKQIYKTPPIKYFGGFNFSQILPDPSKPSKRSFIEDLLFNKVTLADAGFIKQYGDCLGDIAARDLICAQKFNGLTVLPPLLTDEMIAQYTSALLAGTITSGWTFGAGAALQIPFAMQMAYRFNGIGVTQNVLYENQKLIANQFNSAIGKIQDSLSSTASALGKLQDVVNHNAQALNTLVKQLSSKFGAISSVLNDILSRLDPPEAEVQIDRLITGRLQSLQTYVTQQLIRAAEIRASANLAATKMSECVLGQSKRVDFCGKGYHLMSFPQSAPHGVVFLHVTYVPAQEKNFTTAPAICHDGKAHFPREGVFVSNGTHWFVTQRNFYEPQIITTDNTFVSGNCDVVIGIVNNTVYDPLQPELDSFKEELDKYFKNHTSPDVDLGDISGINASVVNIQKEIDRLNEVAKNLNESLIDLQELGKYEQYIKWPWYIWLGFIAGLIAIVMVTIMLCCMTSCCSCLKGCCSCGSCCKFDEDDSEPVLKGVKLHYT

SEQ ID NO: 264 - protein, 1256 aa, synthetic construct
QCVNLITRTQSYTNSFTRGVYYPDKVFRSSVLHSTQDLFLPFFSNVTWFHAIHVSGTNGTKRFDNPALPFNDGVYFASTEKSNIIRGWIFGTTLDSKTQSLLIVNNATNVVIKVCEFQFCNDPFLDVYQKNNKSWMESEFRVYSSANNCTFEYVSQPFLMDLVGKEGNFKNLREFVFKNIDGYFKIYSKHTPINLERDLPQGFSALEPLVDLPIGINITRFQTLLALHRSYLTPVDSSSGWTAGAAAYYVGYLQPRTFLLKYNENGTITDAVDCALDPLSETKCTLKSFTVEKGIYQTSNFRVQPTESIVRFPNITNLCPFHEVFNATTFASVYAWNRKRISNCVADYSVIYNFAPFFAFKCYGVSPTKLNDLCFTNVYADSFVIRGNEVSQIAPGQTGNIADYNYKLPDDFTGCVIAWNSNKLDSKPSGNYNYLYRLFRKSKLKPFERDISTEIYQAGNKPCNGVAGPNCYSPLQSYGFRPTYGVGHQPYRVVVLSFELLHAPATVCGPKKSTNLVKNKCVNFNFNGLTGTGVLTESNKKFLPFQQFGRDIADTTDAVRDPQTLEILDITPCSFGGVSVITPGTNTSNQVAVLYQGVNCTEVPVAIHADQLTPTWRVYSTGSNVFQTRAGCLIGAEYVNNSYECDIPIGAGICASYQTQTKSHQQAQSVASQSIIAYTMSLGAENSVAYSNNSIAIPTNFTISVTTEILPVSMTKTSVDCTMYICGDSTECSNLLLQYGSFCTQLKRALTGIAVEQDKNTQEVFAQVKQIYKTPPIKYFGGFNFSQILPDPSKPSKRSFIEDLLFNKVTLADAGFIKQYGDCLGDIAARDLICAQKFNGLTVLPPLLTDEMIAQYTSALLAGTITSGWTFGAGAALQIPFAMQMAYRFNGIGVTQNVLYENQKLIANQFNSAIGKIQDSLSSTASALGKLQDVVNHNAQALNTLVKQLSSKFGAISSVLNDILSRLDPPEAEVQIDRLITGRLQSLQTYVTQQLIRAAEIRASANLAATKMSECVLGQSKRVDFCGKGYHLMSFPQSAPHGVVFLHVTYVPAQEKNFTTAPAICHDGKAHFPREGVFVSNGTHWFVTQRNFYEPQIITTDNTFVSGNCDVVIGIVNNTVYDPLQPELDSFKEELDKYFKNHTSPDVDLGDISGINASVVNIQKEIDRLNEVAKNLNESLIDLQELGKYEQYIKWPWYIWLGFIAGLIAIVMVTIMLCCMTSCCSCLKGCCSCGSCCKFDEDDSEPVLKGVKLHYT

SEQ ID NO: 265 - protein, 1269 aa, synthetic construct
MFVFLVLLPLVSSQCVNLITRTQSYTNSFTRGVYYPDKVFRSSVLHSTQDLFLPFFSNVTWFHAIHVSGTNGTKRFDNPALPFNDGVYFASTEKSNIIRGWIFGTTLDSKTQSLLIVNNATNVVIKVCEFQFCNDPFLDVYQKNNKSWMESEFRVYSSANNCTFEYVSQPFLMDLEGKEGNFKNLREFVFKNIDGYFKIYSKHTPINLERDLPQGFSALEPLVDLPIGINITRFQTLLALHRSYLTPVDSSSGWTAGAAAYYVGYLQPRTFLLKYNENGTITDAVDCALDPLSETKCTLKSFTVEKGIYQTSNFRVQPTESIVRFPNITNLCPFHEVFNATTFASVYAWNRKRISNCVADYSVIYNFAPFFAFKCYGVSPTKLNDLCFTNVYADSFVIRGNEVSQIAPGQTGNIADYNYKLPDDFTGCVIAWNSNKLDSKPSGNYNYLYRLFRKSKLKPFERDISTEIYQAGNKPCNGVAGPNCYSPLQSYGFRPTYGVGHQPYRVVVLSFELLHAPATVCGPKKSTNLVKNKCVNFNFNGLTGTGVLTESNKKFLPFQQFGRDIADTTDAVRDPQTLEILDITPCSFGGVSVITPGTNTSNQVAVLYQGVNCTEVPVAIHADQLTPTWRVYSTGSNVFQTRAGCLIGAEYVNNSYECDIPIGAGICASYQTQTKSHRRARSVASQSIIAYTMSLGAENSVAYSNNSIAIPTNFTISVTTEILPVSMTKTSVDCTMYICGDSTECSNLLLQYGSFCTQLKRALTGIAVEQDKNTQEVFAQVKQIYKTPPIKYFGGFNFSQILPDPSKPSKRSFIEDLLFNKVTLADAGFIKQYGDCLGDIAARDLICAQKFNGLTVLPPLLTDEMIAQYTSALLAGTITSGWTFGAGAALQIPFAMQMAYRFNGIGVTQNVLYENQKLIANQFNSAIGKIQDSLSSTASALGKLQDVVNHNAQALNTLVKQLSSKFGAISSVLNDILSRLDKVEAEVQIDRLITGRLQSLQTYVTQQLIRAAEIRASANLAATKMSECVLGQSKRVDFCGKGYHLMSFPQSAPHGVVFLHVTYVPAQEKNFTTAPAICHDGKAHFPREGVFVSNGTHWFVTQRNFYEPQIITTDNTFVSGNCDVVIGIVNNTVYDPLQPELDSFKEELDKYFKNHTSPDVDLGDISGINASVVNIQKEIDRLNEVAKNLNESLIDLQELGKYEQYIKWPWYIWLGFIAGLIAIVMVTIMLCCMTSCCSCLKGCCSCGSCCKFDEDDSEPVLKGVKLHYT

SEQ ID NO: 266 - protein, 1269 aa, synthetic construct
MFVFLVLLPLVSSQCVNLITRTQSYTNSFTRGVYYPDKVFRSSVLHSTQDLFLPFFSNVTWFHAIHVSGTNGTKRFDNPALPFNDGVYFASTEKSNIIRGWIFGTTLDSKTQSLLIVNNATNVVIKVCEFQFCNDPFLDVYQKNNKSWMESEFRVYSSANNCTFEYVSQPFLMDLEGKEGNFKNLREFVFKNIDGYFKIYSKHTPINLERDLPQGFSALEPLVDLPIGINITRFQTLLALHRSYLTPVDSSSGWTAGAAAYYVGYLQPRTFLLKYNENGTITDAVDCALDPLSETKCTLKSFTVEKGIYQTSNFRVQPTESIVRFPNITNLCPFHEVFNATTFASVYAWNRKRISNCVADYSVIYNFAPFFAFKCYGVSPTKLNDLCFTNVYADSFVIRGNEVSQIAPGQTGNIADYNYKLPDDFTGCVIAWNSNKLDSKPSGNYNYLYRLFRKSKLKPFERDISTEIYQAGNKPCNGVAGPNCYSPLQSYGFRPTYGVGHQPYRVVVLSFELLHAPATVCGPKKSTNLVKNKCVNFNFNGLTGTGVLTESNKKFLPFQQFGRDIADTTDAVRDPQTLEILDITPCSFGGVSVITPGTNTSNQVAVLYQGVNCTEVPVAIHADQLTPTWRVYSTGSNVFQTRAGCLIGAEYVNNSYECDIPIGAGICASYQTQTKSHQQAQSVASQSIIAYTMSLGAENSVAYSNNSIAIPTNFTISVTTEILPVSMTKTSVDCTMYICGDSTECSNLLLQYGSFCTQLKRALTGIAVEQDKNTQEVFAQVKQIYKTPPIKYFGGFNFSQILPDPSKPSKRSFIEDLLFNKVTLADAGFIKQYGDCLGDIAARDLICAQKFNGLTVLPPLLTDEMIAQYTSALLAGTITSGWTFGAGAALQIPFAMQMAYRFNGIGVTQNVLYENQKLIANQFNSAIGKIQDSLSSTASALGKLQDVVNHNAQALNTLVKQLSSKFGAISSVLNDILSRLDPPEAEVQIDRLITGRLQSLQTYVTQQLIRAAEIRASANLAATKMSECVLGQSKRVDFCGKGYHLMSFPQSAPHGVVFLHVTYVPAQEKNFTTAPAICHDGKAHFPREGVFVSNGTHWFVTQRNFYEPQIITTDNTFVSGNCDVVIGIVNNTVYDPLQPELDSFKEELDKYFKNHTSPDVDLGDISGINASVVNIQKEIDRLNEVAKNLNESLIDLQELGKYEQYIKWPWYIWLGFIAGLIAIVMVTIMLCCMTSCCSCLKGCCSCGSCCKFDEDDSEPVLKGVKLHYT

SEQ ID NO: 267 - protein, 1269 aa, synthetic construct
MFVFLVLLPLVSSQCVNLITRTQSYTNSFTRGVYYPDKVFRSSVLHSTQDLFLPFFSNVTWFHAIHVSGTNGTKRFDNPALPFNDGVYFASTEKSNIIRGWIFGTTLDSKTQSLLIVNNATNVVIKVCEFQFCNDPFLDVYQKNNKSWMESEFRVYSSANNCTFEYVSQPFLMDLEGKEGNFKNLREFVFKNIDGYFKIYSKHTPINLERDLPQGFSALEPLVDLPIGINITRFQTLLALHRSYLTPVDSSSGWTAGAAAYYVGYLQPRTFLLKYNENGTITDAVDCALDPLSETKCTLKSFTVEKGIYQTSNFRVQPTESIVRFPNITNLCPFHEVFNATTFASVYAWNRKRISNCVADYSVIYNFAPFFAFKCYGVSPTKLNDLCFTNVYADSFVIRGNEVSQIAPGQTGNIADYNYKLPDDFTGCVIAWNSNKLDSKPSGNYNYLYRLFRKSKLKPFERDISTEIYQAGNKPCNGVAGPNCYSPLQSYGFRPTYGVGHQPYRVVVLSFELLHASATVCGPKKSTNLVKNKCVNFNFNGLTGTGVLTESNKKFLPFQQFGRDIADTTDAVRDPQTLEILDITPCSFGGVSVITPGTNTSNQVAVLYQGVNCTEVPVAIHADQLTPTWRVYSTGSNVFQTRAGCLIGAEYVNNSYECDIPIGAGICASYQTQTKSHRRARSVASQSIIAYTMSLGAENSVAYSNNSIAIPTNFTISVTTEILPVSMTKTSVDCTMYICGDSTECSNLLLQYGSFCTQLKRALTGIAVEQDKNTQEVFAQVKQIYKTPPIKYFGGFNFSQILPDPSKPSKRSFIEDLLFNKVTLADAGFIKQYGDCLGDIAARDLICAQKFNGLTVLPPLLTDEMIAQYTSALLAGTITSGWTFGAGAALQIPFAMQMAYRFNGIGVTQNVLYENQKLIANQFNSAIGKIQDSLSSTASALGKLQDVVNHNAQALNTLVKQLSSKFGAISSVLNDILSRLDKVEAEVQIDRLITGRLQSLQTYVTQQLIRAAEIRASANLAATKMSECVLGQSKRVDFCGKGYHLMSFPQSAPHGVVFLHVTYVPAQEKNFTTAPAICHDGKAHFPREGVFVSNGTHWFVTQRNFYEPQIITTDNTFVSGNCDVVIGIVNNTVYDPLQPELDSFKEELDKYFKNHTSPDVDLGDISGINASVVNIQKEIDRLNEVAKNLNESLIDLQELGKYEQYIKWPWYIWLGFIAGLIAIVMVTIMLCCMTSCCSCLKGCCSCGSCCKFDEDDSEPVLKGVKLHYT

SEQ ID NO: 268 - protein, 1269 aa, synthetic construct
MFVFLVLLPLVSSQCVNLITRTQSYTNSFTRGVYYPDKVFRSSVLHSTQDLFLPFFSNVTWFHAIHVSGTNGTKRFDNPALPFNDGVYFASTEKSNIIRGWIFGTTLDSKTQSLLIVNNATNVVIKVCEFQFCNDPFLDVYQKNNKSWMESEFRVYSSANNCTFEYVSQPFLMDLEGKEGNFKNLREFVFKNIDGYFKIYSKHTPINLERDLPQGFSALEPLVDLPIGINITRFQTLLALHRSYLTPVDSSSGWTAGAAAYYVGYLQPRTFLLKYNENGTITDAVDCALDPLSETKCTLKSFTVEKGIYQTSNFRVQPTESIVRFPNITNLCPFHEVFNATTFASVYAWNRKRISNCVADYSVIYNFAPFFAFKCYGVSPTKLNDLCFTNVYADSFVIRGNEVSQIAPGQTGNIADYNYKLPDDFTGCVIAWNSNKLDSKPSGNYNYLYRLFRKSKLKPFERDISTEIYQAGNKPCNGVAGPNCYSPLQSYGFRPTYGVGHQPYRVVVLSFELLHASATVCGPKKSTNLVKNKCVNFNFNGLTGTGVLTESNKKFLPFQQFGRDIADTTDAVRDPQTLEILDITPCSFGGVSVITPGTNTSNQVAVLYQGVNCTEVPVAIHADQLTPTWRVYSTGSNVFQTRAGCLIGAEYVNNSYECDIPIGAGICASYQTQTKSHQQAQSVASQSIIAYTMSLGAENSVAYSNNSIAIPTNFTISVTTEILPVSMTKTSVDCTMYICGDSTECSNLLLQYGSFCTQLKRALTGIAVEQDKNTQEVFAQVKQIYKTPPIKYFGGFNFSQILPDPSKPSKRSFIEDLLFNKVTLADAGFIKQYGDCLGDIAARDLICAQKFNGLTVLPPLLTDEMIAQYTSALLAGTITSGWTFGAGAALQIPFAMQMAYRFNGIGVTQNVLYENQKLIANQFNSAIGKIQDSLSSTASALGKLQDVVNHNAQALNTLVKQLSSKFGAISSVLNDILSRLDPPEAEVQIDRLITGRLQSLQTYVTQQLIRAAEIRASANLAATKMSECVLGQSKRVDFCGKGYHLMSFPQSAPHGVVFLHVTYVPAQEKNFTTAPAICHDGKAHFPREGVFVSNGTHWFVTQRNFYEPQIITTDNTFVSGNCDVVIGIVNNTVYDPLQPELDSFKEELDKYFKNHTSPDVDLGDISGINASVVNIQKEIDRLNEVAKNLNESLIDLQELGKYEQYIKWPWYIWLGFIAGLIAIVMVTIMLCCMTSCCSCLKGCCSCGSCCKFDEDDSEPVLKGVKLHYT

SEQ ID NO: 269 - protein, 1269 aa, synthetic construct
MFVFLVLLPLVSSQCVNLITRTQSYTNSFTRGVYYPDKVFRSSVLHSTQDLFLPFFSNVTWFHAIHVSGTNGTKRFDNPALPFNDGVYFASTEKSNIIRGWIFGTTLDSKTQSLLIVNNATNVVIKVCEFQFCNDPFLDVYQKNNKSWMESEFRVYSSANNCTFEYVSQPFLMDLEGKEGNFKNLREFVFKNIDGYFKIYSKHTPINLERDLPQGFSALEPLVDLPIGINITRFQTLLALHRSYLTPVDSSSGWTAGAAAYYVGYLQPRTFLLKYNENGTITDAVDCALDPLSETKCTLKSFTVEKGIYQTSNFRVQPTESIVRFPNITNLCPFHEVFNATTFASVYAWNRKRISNCVADYSVIYNFAPFFAFKCYGVSPTKLNDLCFTNVYADSFVIRGNEVSQIAPGQTGNIADYNYKLPDDFTGCVIAWNSNKLDSTPSGNYNYLYRLFRKSKLKPFERDISTEIYQAGNKPCNGVAGPNCYSPLQSYGFRPTYGVGHQPYRVVVLSFELLHAPATVCGPKKSTNLVKNKCVNFNFNGLTGTGVLTESNKKFLPFQQFGRDIADTTDAVRDPQTLEILDITPCSFGGVSVITPGTNTSNQVAVLYQGVNCTEVPVAIHADQLTPTWRVYSTGSNVFQTRAGCLIGAEYVNNSYECDIPIGAGICASYQTQTKSHRRARSVASQSIIAYTMSLGAENSVAYSNNSIAIPTNFTISVTTEILPVSMTKTSVDCTMYICGDSTECSNLLLQYGSFCTQLKRALTGIAVEQDKNTQEVFAQVKQIYKTPPIKYFGGFNFSQILPDPSKPSKRSFIEDLLFNKVTLADAGFIKQYGDCLGDIAARDLICAQKFNGLTVLPPLLTDEMIAQYTSALLAGTITSGWTFGAGAALQIPFAMQMAYRFNGIGVTQNVLYENQKLIANQFNSAIGKIQDSLSSTASALGKLQDVVNHNAQALNTLVKQLSSKFGAISSVLNDILSRLDKVEAEVQIDRLITGRLQSLQTYVTQQLIRAAEIRASANLAATKMSECVLGQSKRVDFCGKGYHLMSFPQSAPHGVVFLHVTYVPAQEKNFTTAPAICHDGKAHFPREGVFVSNGTHWFVTQRNFYEPQIITTDNTFVSGNCDVVIGIVNNTVYDPLQPELDSFKEELDKYFKNHTSPDVDLGDISGINASVVNIQKEIDRLNEVAKNLNESLIDLQELGKYEQYIKWPWYIWLGFIAGLIAIVMVTIMLCCMTSCCSCLKGCCSCGSCCKFDEDDSEPVLKGVKLHYT

SEQ ID NO: 270 - protein, 1269 aa, synthetic construct
MFVFLVLLPLVSSQCVNLITRTQSYTNSFTRGVYYPDKVFRSSVLHSTQDLFLPFFSNVTWFHAIHVSGTNGTKRFDNPALPFNDGVYFASTEKSNIIRGWIFGTTLDSKTQSLLIVNNATNVVIKVCEFQFCNDPFLDVYQKNNKSWMESEFRVYSSANNCTFEYVSQPFLMDLEGKEGNFKNLREFVFKNIDGYFKIYSKHTPINLERDLPQGFSALEPLVDLPIGINITRFQTLLALHRSYLTPVDSSSGWTAGAAAYYVGYLQPRTFLLKYNENGTITDAVDCALDPLSETKCTLKSFTVEKGIYQTSNFRVQPTESIVRFPNITNLCPFHEVFNATTFASVYAWNRKRISNCVADYSVIYNFAPFFAFKCYGVSPTKLNDLCFTNVYADSFVIRGNEVSQIAPGQTGNIADYNYKLPDDFTGCVIAWNSNKLDSTPSGNYNYLYRLFRKSKLKPFERDISTEIYQAGNKPCNGVAGPNCYSPLQSYGFRPTYGVGHQPYRVVVLSFELLHAPATVCGPKKSTNLVKNKCVNFNFNGLTGTGVLTESNKKFLPFQQFGRDIADTTDAVRDPQTLEILDITPCSFGGVSVITPGTNTSNQVAVLYQGVNCTEVPVAIHADQLTPTWRVYSTGSNVFQTRAGCLIGAEYVNNSYECDIPIGAGICASYQTQTKSHQQAQSVASQSIIAYTMSLGAENSVAYSNNSIAIPTNFTISVTTEILPVSMTKTSVDCTMYICGDSTECSNLLLQYGSFCTQLKRALTGIAVEQDKNTQEVFAQVKQIYKTPPIKYFGGFNFSQILPDPSKPSKRSFIEDLLFNKVTLADAGFIKQYGDCLGDIAARDLICAQKFNGLTVLPPLLTDEMIAQYTSALLAGTITSGWTFGAGAALQIPFAMQMAYRFNGIGVTQNVLYENQKLIANQFNSAIGKIQDSLSSTASALGKLQDVVNHNAQALNTLVKQLSSKFGAISSVLNDILSRLDPPEAEVQIDRLITGRLQSLQTYVTQQLIRAAEIRASANLAATKMSECVLGQSKRVDFCGKGYHLMSFPQSAPHGVVFLHVTYVPAQEKNFTTAPAICHDGKAHFPREGVFVSNGTHWFVTQRNFYEPQIITTDNTFVSGNCDVVIGIVNNTVYDPLQPELDSFKEELDKYFKNHTSPDVDLGDISGINASVVNIQKEIDRLNEVAKNLNESLIDLQELGKYEQYIKWPWYIWLGFIAGLIAIVMVTIMLCCMTSCCSCLKGCCSCGSCCKFDEDDSEPVLKGVKLHYT

SEQ ID NO: 271 - protein, 1269 aa, synthetic construct
MFVFLVLLPLVSSQCVNLITRTQSYTNSFTRGVYYPDKVFRSSVLHSTQDLFLPFFSNVTWFHAIHVSGTNGTKRFDNPALPFNDGVYFASTEKSNIIRGWIFGTTLDSKTQSLLIVNNATNVVIKVCEFQFCNDPFLDVYQKNNKSWMESEFRVYSSANNCTFEYVSQPFLMDLEGKEGNFKNLREFVFKNIDGYFKIYSKHTPINLERDLPQGFSALEPLVDLPIGINITRFQTLLALHRSYLTPVDSSSGWTAGAAAYYVGYLQPRTFLLKYNENGTITDAVDCALDPLSETKCTLKSFTVEKGIYQTSNFRVQPTESIVRFPNITNLCPFHEVFNATTFASVYAWNRKRISNCVADYSVIYNFAPFFAFKCYGVSPTKLNDLCFTNVYADSFVIRGNEVSQIAPGQTGNIADYNYKLPDDFTGCVIAWNSNKLDSKPSGNYNYLYRLFRKSKLKPFERDISTEIYQAGNKPCNGVAGSNCYSPLQSYGFRPTYGVGHQPYRVVVLSFELLHAPATVCGPKKSTNLVKNKCVNFNFNGLTGTGVLTESNKKFLPFQQFGRDIADTTDAVRDPQTLEILDITPCSFGGVSVITPGTNTSNQVAVLYQGVNCTEVPVAIHADQLTPTWRVYSTGSNVFQTRAGCLIGAEYVNNSYECDIPIGAGICASYQTQTKSHRRARSVASQSIIAYTMSLGAENSVAYSNNSIAIPTNFTISVTTEILPVSMTKTSVDCTMYICGDSTECSNLLLQYGSFCTQLKRALTGIAVEQDKNTQEVFAQVKQIYKTPPIKYFGGFNFSQILPDPSKPSKRSFIEDLLFNKVTLADAGFIKQYGDCLGDIAARDLICAQKFNGLTVLPPLLTDEMIAQYTSALLAGTITSGWTFGAGAALQIPFAMQMAYRFNGIGVTQNVLYENQKLIANQFNSAIGKIQDSLSSTASALGKLQDVVNHNAQALNTLVKQLSSKFGAISSVLNDILSRLDKVEAEVQIDRLITGRLQSLQTYVTQQLIRAAEIRASANLAATKMSECVLGQSKRVDFCGKGYHLMSFPQSAPHGVVFLHVTYVPAQEKNFTTAPAICHDGKAHFPREGVFVSNGTHWFVTQRNFYEPQIITTDNTFVSGNCDVVIGIVNNTVYDPLQPELDSFKEELDKYFKNHTSPDVDLGDISGINASVVNIQKEIDRLNEVAKNLNESLIDLQELGKYEQYIKWPWYIWLGFIAGLIAIVMVTIMLCCMTSCCSCLKGCCSCGSCCKFDEDDSEPVLKGVKLHYT

SEQ ID NO: 272 - protein, 1269 aa, synthetic construct; identical to SEQ ID NO: 230

SEQ ID NO: 273 - protein, 1256 aa, synthetic construct
QCVNLITRTQSYTNSFTRGVYYPDKVFRSSVLHSTQDLFLPFFSNVTWFHAIHVSGTNGTKRFDNPALPFNDGVYFASTEKSNIIRGWIFGTTLDSKTQSLLIVNNATNVVIKVCEFQFCNDPFLDVYQKNNKSWMESEFRVYSSANNCTFEYVSQPFLMDLEGKEGNFKNLREFVFKNIDGYFKIYSKHTPINLERDLPQGFSALEPLVDLPIGINITRFQTLLALHRSYLTPVDSSSGWTAGAAAYYVGYLQPRTFLLKYNENGTITDAVDCALDPLSETKCTLKSFTVEKGIYQTSNFRVQPTESIVRFPNITNLCPFHEVFNATTFASVYAWNRKRISNCVADYSVIYNFAPFFAFKCYGVSPTKLNDLCFTNVYADSFVIRGNEVSQIAPGQTGNIADYNYKLPDDFTGCVIAWNSNKLDSKPSGNYNYLYRLFRKSKLKPFERDISTEIYQAGNKPCNGVAGPNCYSPLQSYGFRPTYGVGHQPYRVVVLSFELLHAPATVCGPKKSTNLVKNKCVNFNFNGLTGTGVLTESNKKFLPFQQFGRDIADTTDAVRDPQTLEILDITPCSFGGVSVITPGTNTSNQVAVLYQGVNCTEVPVAIHADQLTPTWRVYSTGSNVFQTRAGCLIGAEYVNNSYECDIPIGAGICASYQTQTKSHRRARSVASQSIIAYTMSLGAENSVAYSNNSIAIPTNFTISVTTEILPVSMTKTSVDCTMYICGDSTECSNLLLQYGSFCTQLKRALTGIAVEQDKNTQEVFAQVKQIYKTPPIKYFGGFNFSQILPDPSKPSKRSFIEDLLFNKVTLADAGFIKQYGDCLGDIAARDLICAQKFNGLTVLPPLLTDEMIAQYTSALLAGTITSGWTFGAGAALQIPFAMQMAYRFNGIGVTQNVLYENQKLIANQFNSAIGKIQDSLSSTASALGKLQDVVNHNAQALNTLVKQLSSKFGAISSVLNDILSRLDKVEAEVQIDRLITGRLQSLQTYVTQQLIRAAEIRASANLAATKMSECVLGQSKRVDFCGKGYHLMSFPQSAPHGVVFLHVTYVPAQEKNFTTAPAICHDGKAHFPREGVFVSNGTHWFVTQRNFYEPQIITTDNTFVSGNCDVVIGIVNNTVYDPLQPELDSFKEELDKYFKNHTSPDVDLGDISGINASVVNIQKEIDRLNEVAKNLNESLIDLQELGKYEQYIKWPWYIWLGFIAGLIAIVMVTIMLCCMTSCCSCLKGCCSCGSCCKFDEDDSEPVLKGVKLHYT

SEQ ID NO: 274 - protein, 1256 aa, synthetic construct
QCVNLITRTQSYTNSFTRGVYYPDKVFRSSVLHSTQDLFLPFFSNVTWFHAIHVSGTNGTKRFDNPALPFNDGVYFASTEKSNIIRGWIFGTTLDSKTQSLLIVNNATNVVIKVCEFQFCNDPFLDVYQKNNKSWMESEFRVYSSANNCTFEYVSQPFLMDLEGKEGNFKNLREFVFKNIDGYFKIYSKHTPINLERDLPQGFSALEPLVDLPIGINITRFQTLLALHRSYLTPVDSSSGWTAGAAAYYVGYLQPRTFLLKYNENGTITDAVDCALDPLSETKCTLKSFTVEKGIYQTSNFRVQPTESIVRFPNITNLCPFHEVFNATTFASVYAWNRKRISNCVADYSVIYNFAPFFAFKCYGVSPTKLNDLCFTNVYADSFVIRGNEVSQIAPGQTGNIADYNYKLPDDFTGCVIAWNSNKLDSKPSGNYNYLYRLFRKSKLKPFERDISTEIYQAGNKPCNGVAGPNCYSPLQSYGFRPTYGVGHQPYRVVVLSFELLHAPATVCGPKKSTNLVKNKCVNFNFNGLTGTGVLTESNKKFLPFQQFGRDIADTTDAVRDPQTLEILDITPCSFGGVSVITPGTNTSNQVAVLYQGVNCTEVPVAIHADQLTPTWRVYSTGSNVFQTRAGCLIGAEYVNNSYECDIPIGAGICASYQTQTKSHQQAQSVASQSIIAYTMSLGAENSVAYSNNSIAIPTNFTISVTTEILPVSMTKTSVDCTMYICGDSTECSNLLLQYGSFCTQLKRALTGIAVEQDKNTQEVFAQVKQIYKTPPIKYFGGFNFSQILPDPSKPSKRSFIEDLLFNKVTLADAGFIKQYGDCLGDIAARDLICAQKFNGLTVLPPLLTDEMIAQYTSALLAGTITSGWTFGAGAALQIPFAMQMAYRFNGIGVTQNVLYENQKLIANQFNSAIGKIQDSLSSTASALGKLQDVVNHNAQALNTLVKQLSSKFGAISSVLNDILSRLDPPEAEVQIDRLITGRLQSLQTYVTQQLIRAAEIRASANLAATKMSECVLGQSKRVDFCGKGYHLMSFPQSAPHGVVFLHVTYVPAQEKNFTTAPAICHDGKAHFPREGVFVSNGTHWFVTQRNFYEPQIITTDNTFVSGNCDVVIGIVNNTVYDPLQPELDSFKEELDKYFKNHTSPDVDLGDISGINASVVNIQKEIDRLNEVAKNLNESLIDLQELGKYEQYIKWPWYIWLGFIAGLIAIVMVTIMLCCMTSCCSCLKGCCSCGSCCKFDEDDSEPVLKGVKLHYT

SEQ ID NO: 275 - protein, 1256 aa, synthetic construct
QCVNLITRTQSYTNSFTRGVYYPDKVFRSSVLHSTQDLFLPFFSNVTWFHAIHVSGTNGTKRFDNPALPFNDGVYFASTEKSNIIRGWIFGTTLDSKTQSLLIVNNATNVVIKVCEFQFCNDPFLDVYQKNNKSWMESEFRVYSSANNCTFEYVSQPFLMDLEGKEGNFKNLREFVFKNIDGYFKIYSKHTPINLERDLPQGFSALEPLVDLPIGINITRFQTLLALHRSYLTPVDSSSGWTAGAAAYYVGYLQPRTFLLKYNENGTITDAVDCALDPLSETKCTLKSFTVEKGIYQTSNFRVQPTESIVRFPNITNLCPFHEVFNATTFASVYAWNRKRISNCVADYSVIYNFAPFFAFKCYGVSPTKLNDLCFTNVYADSFVIRGNEVSQIAPGQTGNIADYNYKLPDDFTGCVIAWNSNKLDSKPSGNYNYLYRLFRKSKLKPFERDISTEIYQAGNKPCNGVAGPNCYSPLQSYGFRPTYGVGHQPYRVVVLSFELLHASATVCGPKKSTNLVKNKCVNFNFNGLTGTGVLTESNKKFLPFQQFGRDIADTTDAVRDPQTLEILDITPCSFGGVSVITPGTNTSNQVAVLYQGVNCTEVPVAIHADQLTPTWRVYSTGSNVFQTRAGCLIGAEYVNNSYECDIPIGAGICASYQTQTKSHRRARSVASQSIIAYTMSLGAENSVAYSNNSIAIPTNFTISVTTEILPVSMTKTSVDCTMYICGDSTECSNLLLQYGSFCTQLKRALTGIAVEQDKNTQEVFAQVKQIYKTPPIKYFGGFNFSQILPDPSKPSKRSFIEDLLFNKVTLADAGFIKQYGDCLGDIAARDLICAQKFNGLTVLPPLLTDEMIAQYTSALLAGTITSGWTFGAGAALQIPFAMQMAYRFNGIGVTQNVLYENQKLIANQFNSAIGKIQDSLSSTASALGKLQDVVNHNAQALNTLVKQLSSKFGAISSVLNDILSRLDKVEAEVQIDRLITGRLQSLQTYVTQQLIRAAEIRASANLAATKMSECVLGQSKRVDFCGKGYHLMSFPQSAPHGVVFLHVTYVPAQEKNFTTAPAICHDGKAHFPREGVFVSNGTHWFVTQRNFYEPQIITTDNTFVSGNCDVVIGIVNNTVYDPLQPELDSFKEELDKYFKNHTSPDVDLGDISGINASVVNIQKEIDRLNEVAKNLNESLIDLQELGKYEQYIKWPWYIWLGFIAGLIAIVMVTIMLCCMTSCCSCLKGCCSCGSCCKFDEDDSEPVLKGVKLHYT

SEQ ID NO: 276 - protein, 1256 aa, synthetic construct
QCVNLITRTQSYTNSFTRGVYYPDKVFRSSVLHSTQDLFLPFFSNVTWFHAIHVSGTNGTKRFDNPALPFNDGVYFASTEKSNIIRGWIFGTTLDSKTQSLLIVNNATNVVIKVCEFQFCNDPFLDVYQKNNKSWMESEFRVYSSANNCTFEYVSQPFLMDLEGKEGNFKNLREFVFKNIDGYFKIYSKHTPINLERDLPQGFSALEPLVDLPIGINITRFQTLLALHRSYLTPVDSSSGWTAGAAAYYVGYLQPRTFLLKYNENGTITDAVDCALDPLSETKCTLKSFTVEKGIYQTSNFRVQPTESIVRFPNITNLCPFHEVFNATTFASVYAWNRKRISNCVADYSVIYNFAPFFAFKCYGVSPTKLNDLCFTNVYADSFVIRGNEVSQIAPGQTGNIADYNYKLPDDFTGCVIAWNSNKLDSKPSGNYNYLYRLFRKSKLKPFERDISTEIYQAGNKPCNGVAGPNCYSPLQSYGFRPTYGVGHQPYRVVVLSFELLHASATVCGPKKSTNLVKNKCVNFNFNGLTGTGVLTESNKKFLPFQQFGRDIADTTDAVRDPQTLEILDITPCSFGGVSVITPGTNTSNQVAVLYQGVNCTEVPVAIHADQLTPTWRVYSTGSNVFQTRAGCLIGAEYVNNSYECDIPIGAGICASYQTQTKSHQQAQSVASQSIIAYTMSLGAENSVAYSNNSIAIPTNFTISVTTEILPVSMTKTSVDCTMYICGDSTECSNLLLQYGSFCTQLKRALTGIAVEQDKNTQEVFAQVKQIYKTPPIKYFGGFNFSQILPDPSKPSKRSFIEDLLFNKVTLADAGFIKQYGDCLGDIAARDLICAQKFNGLTVLPPLLTDEMIAQYTSALLAGTITSGWTFGAGAALQIPFAMQMAYRFNGIGVTQNVLYENQKLIANQFNSAIGKIQDSLSSTASALGKLQDVVNHNAQALNTLVKQLSSKFGAISSVLNDILSRLDPPEAEVQIDRLITGRLQSLQTYVTQQLIRAAEIRASANLAATKMSECVLGQSKRVDFCGKGYHLMSFPQSAPHGVVFLHVTYVPAQEKNFTTAPAICHDGKAHFPREGVFVSNGTHWFVTQRNFYEPQIITTDNTFVSGNCDVVIGIVNNTVYDPLQPELDSFKEELDKYFKNHTSPDVDLGDISGINASVVNIQKEIDRLNEVAKNLNESLIDLQELGKYEQYIKWPWYIWLGFIAGLIAIVMVTIMLCCMTSCCSCLKGCCSCGSCCKFDEDDSEPVLKGVKLHYT

SEQ ID NO: 277 - protein, 1256 aa, synthetic construct
QCVNLITRTQSYTNSFTRGVYYPDKVFRSSVLHSTQDLFLPFFSNVTWFHAIHVSGTNGTKRFDNPALPFNDGVYFASTEKSNIIRGWIFGTTLDSKTQSLLIVNNATNVVIKVCEFQFCNDPFLDVYQKNNKSWMESEFRVYSSANNCTFEYVSQPFLMDLEGKEGNFKNLREFVFKNIDGYFKIYSKHTPINLERDLPQGFSALEPLVDLPIGINITRFQTLLALHRSYLTPVDSSSGWTAGAAAYYVGYLQPRTFLLKYNENGTITDAVDCALDPLSETKCTLKSFTVEKGIYQTSNFRVQPTESIVRFPNITNLCPFHEVFNATTFASVYAWNRKRISNCVADYSVIYNFAPFFAFKCYGVSPTKLNDLCFTNVYADSFVIRGNEVSQIAPGQTGNIADYNYKLPDDFTGCVIAWNSNKLDSTPSGNYNYLYRLFRKSKLKPFERDISTEIYQAGNKPCNGVAGPNCYSPLQSYGFRPTYGVGHQPYRVVVLSFELLHAPATVCGPKKSTNLVKNKCVNFNFNGLTGTGVLTESNKKFLPFQQFGRDIADTTDAVRDPQTLEILDITPCSFGGVSVITPGTNTSNQVAVLYQGVNCTEVPVAIHADQLTPTWRVYSTGSNVFQTRAGCLIGAEYVNNSYECDIPIGAGICASYQTQTKSHRRARSVASQSIIAYTMSLGAENSVAYSNNSIAIPTNFTISVTTEILPVSMTKTSVDCTMYICGDSTECSNLLLQYGSFCTQLKRALTGIAVEQDKNTQEVFAQVKQIYKTPPIKYFGGFNFSQILPDPSKPSKRSFIEDLLFNKVTLADAGFIKQYGDCLGDIAARDLICAQKFNGLTVLPPLLTDEMIAQYTSALLAGTITSGWTFGAGAALQIPFAMQMAYRFNGIGVTQNVLYENQKLIANQFNSAIGKIQDSLSSTASALGKLQDVVNHNAQALNTLVKQLSSKFGAISSVLNDILSRLDKVEAEVQIDRLITGRLQSLQTYVTQQLIRAAEIRASANLAATKMSECVLGQSKRVDFCGKGYHLMSFPQSAPHGVVFLHVTYVPAQEKNFTTAPAICHDGKAHFPREGVFVSNGTHWFVTQRNFYEPQIITTDNTFVSGNCDVVIGIVNNTVYDPLQPELDSFKEELDKYFKNHTSPDVDLGDISGINASVVNIQKEIDRLNEVAKNLNESLIDLQELGKYEQYIKWPWYIWLGFIAGLIAIVMVTIMLCCMTSCCSCLKGCCSCGSCCKFDEDDSEPVLKGVKLHYT

SEQ ID NO: 278 - protein, 1256 aa, synthetic construct
QCVNLITRTQSYTNSFTRGVYYPDKVFRSSVLHSTQDLFLPFFSNVTWFHAIHVSGTNGTKRFDNPALPFNDGVYFASTEKSNIIRGWIFGTTLDSKTQSLLIVNNATNVVIKVCEFQFCNDPFLDVYQKNNKSWMESEFRVYSSANNCTFEYVSQPFLMDLEGKEGNFKNLREFVFKNIDGYFKIYSKHTPINLERDLPQGFSALEPLVDLPIGINITRFQTLLALHRSYLTPVDSSSGWTAGAAAYYVGYLQPRTFLLKYNENGTITDAVDCALDPLSETKCTLKSFTVEKGIYQTSNFRVQPTESIVRFPNITNLCPFHEVFNATTFASVYAWNRKRISNCVADYSVIYNFAPFFAFKCYGVSPTKLNDLCFTNVYADSFVIRGNEVSQIAPGQTGNIADYNYKLPDDFTGCVIAWNSNKLDSTPSGNYNYLYRLFRKSKLKPFERDISTEIYQAGNKPCNGVAGPNCYSPLQSYGFRPTYGVGHQPYRVVVLSFELLHAPATVCGPKKSTNLVKNKCVNFNFNGLTGTGVLTESNKKFLPFQQFGRDIADTTDAVRDPQTLEILDITPCSFGGVSVITPGTNTSNQVAVLYQGVNCTEVPVAIHADQLTPTWRVYSTGSNVFQTRAGCLIGAEYVNNSYECDIPIGAGICASYQTQTKSHQQAQSVASQSIIAYTMSLGAENSVAYSNNSIAIPTNFTISVTTEILPVSMTKTSVDCTMYICGDSTECSNLLLQYGSFCTQLKRALTGIAVEQDKNTQEVFAQVKQIYKTPPIKYFGGFNFSQILPDPSKPSKRSFIEDLLFNKVTLADAGFIKQYGDCLGDIAARDLICAQKFNGLTVLPPLLTDEMIAQYTSALLAGTITSGWTFGAGAALQIPFAMQMAYRFNGIGVTQNVLYENQKLIANQFNSAIGKIQDSLSSTASALGKLQDVVNHNAQALNTLVKQLSSKFGAISSVLNDILSRLDPPEAEVQIDRLITGRLQSLQTYVTQQLIRAAEIRASANLAATKMSECVLGQSKRVDFCGKGYHLMSFPQSAPHGVVFLHVTYVPAQEKNFTTAPAICHDGKAHFPREGVFVSNGTHWFVTQRNFYEPQIITTDNTFVSGNCDVVIGIVNNTVYDPLQPELDSFKEELDKYFKNHTSPDVDLGDISGINASVVNIQKEIDRLNEVAKNLNESLIDLQELGKYEQYIKWPWYIWLGFIAGLIAIVMVTIMLCCMTSCCSCLKGCCSCGSCCKFDEDDSEPVLKGVKLHYT

SEQ ID NO: 279 - protein, 1256 aa, synthetic construct
QCVNLITRTQSYTNSFTRGVYYPDKVFRSSVLHSTQDLFLPFFSNVTWFHAIHVSGTNGTKRFDNPALPFNDGVYFASTEKSNIIRGWIFGTTLDSKTQSLLIVNNATNVVIKVCEFQFCNDPFLDVYQKNNKSWMESEFRVYSSANNCTFEYVSQPFLMDLEGKEGNFKNLREFVFKNIDGYFKIYSKHTPINLERDLPQGFSALEPLVDLPIGINITRFQTLLALHRSYLTPVDSSSGWTAGAAAYYVGYLQPRTFLLKYNENGTITDAVDCALDPLSETKCTLKSFTVEKGIYQTSNFRVQPTESIVRFPNITNLCPFHEVFNATTFASVYAWNRKRISNCVADYSVIYNFAPFFAFKCYGVSPTKLNDLCFTNVYADSFVIRGNEVSQIAPGQTGNIADYNYKLPDDFTGCVIAWNSNKLDSKPSGNYNYLYRLFRKSKLKPFERDISTEIYQAGNKPCNGVAGSNCYSPLQSYGFRPTYGVGHQPYRVVVLSFELLHAPATVCGPKKSTNLVKNKCVNFNFNGLTGTGVLTESNKKFLPFQQFGRDIADTTDAVRDPQTLEILDITPCSFGGVSVITPGTNTSNQVAVLYQGVNCTEVPVAIHADQLTPTWRVYSTGSNVFQTRAGCLIGAEYVNNSYECDIPIGAGICASYQTQTKSHRRARSVASQSIIAYTMSLGAENSVAYSNNSIAIPTNFTISVTTEILPVSMTKTSVDCTMYICGDSTECSNLLLQYGSFCTQLKRALTGIAVEQDKNTQEVFAQVKQIYKTPPIKYFGGFNFSQILPDPSKPSKRSFIEDLLFNKVTLADAGFIKQYGDCLGDIAARDLICAQKFNGLTVLPPLLTDEMIAQYTSALLAGTITSGWTFGAGAALQIPFAMQMAYRFNGIGVTQNVLYENQKLIANQFNSAIGKIQDSLSSTASALGKLQDVVNHNAQALNTLVKQLSSKFGAISSVLNDILSRLDKVEAEVQIDRLITGRLQSLQTYVTQQLIRAAEIRASANLAATKMSECVLGQSKRVDFCGKGYHLMSFPQSAPHGVVFLHVTYVPAQEKNFTTAPAICHDGKAHFPREGVFVSNGTHWFVTQRNFYEPQIITTDNTFVSGNCDVVIGIVNNTVYDPLQPELDSFKEELDKYFKNHTSPDVDLGDISGINASVVNIQKEIDRLNEVAKNLNESLIDLQELGKYEQYIKWPWYIWLGFIAGLIAIVMVTIMLCCMTSCCSCLKGCCSCGSCCKFDEDDSEPVLKGVKLHYT

SEQ ID NO: 280 - protein, 1256 aa, synthetic construct; identical to SEQ ID NO: 234

SEQ ID NO: 281 - protein, 1269 aa, synthetic construct
MFVFLVLLPLVSSQCVNLITRTQSYTNSFTRGVYYPDKVFRSSVLHSTQDLFLPFFSNVTWFHAIHVSGTNGTKRFDNPALPFNDGVYFASTEKSNIIRGWIFGTTLDSKTQSLLIVNNATNVVIKVCEFQFCNDPFLDVYQKNNKSWMESEFRVYSSANNCTFEYVSQPFLMDLEGKEGNFKNLREFVFKNIDGYFKIYSKHTPINLERDLPQGFSALEPLVDLPIGINITRFQTLLALHRSYLTPGGSSSGWTAGAAAYYVGYLQPRTFLLKYNENGTITDAVDCALDPLSETKCTLKSFTVEKGIYQTSNFRVQPTESIVRFPNITNLCPFHEVFNATTFASVYAWNRKRISNCVADYSVIYNFAPFFAFKCYGVSPTKLNDLCFTNVYADSFVIRGNEVSQIAPGQTGNIADYNYKLPDDFTGCVIAWNSNKLDSKPSGNYNYLYRLFRKSKLKPFERDISTEIYQAGNKPCNGVAGPNCYSPLQSYGFRPTYGVGHQPYRVVVLSFELLHASATVCGPKKSTNLVKNKCVNFNFNGLTGTGVLTESNKKFLPFQQFGRDIADTTDAVRDPQTLEILDITPCSFGGVSVITPGTNTSNQVAVLYQGVNCTEVPVAIHADQLTPTWRVYSTGSNVFQTRAGCLIGAEYVNNSYECDIPIGAGICASYQTQTKSHRRARSVASQSIIAYTMSLGAENSVAYSNNSIAIPTNFTISVTTEILPVSMTKTSVDCTMYICGDSTECSNLLLQYGSFCTQLKRALTGIAVEQDKNTQEVFAQVKQIYKTPPIKYFGGFNFSQILPDPSKPSKRSFIEDLLFNKVTLADAGFIKQYGDCLGDIAARDLICAQKFNGLTVLPPLLTDEMIAQYTSALLAGTITSGWTFGAGAALQIPFAMQMAYRFNGIGVTQNVLYENQKLIANQFNSAIGKIQDSLSSTASALGKLQDVVNHNAQALNTLVKQLSSKFGAISSVLNDILSRLDKVEAEVQIDRLITGRLQSLQTYVTQQLIRAAEIRASANLAATKMSECVLGQSKRVDFCGKGYHLMSFPQSAPHGVVFLHVTYVPAQEKNFTTAPAICHDGKAHFPREGVFVSNGTHWFVTQRNFYEPQIITTDNTFVSGNCDVVIGIVNNTVYDPLQPELDSFKEELDKYFKNHTSPDVDLGDISGINASVVNIQKEIDRLNEVAKNLNESLIDLQELGKYEQYIKWPWYIWLGFIAGLIAIVMVTIMLCCMTSCCSCLKGCCSCGSCCKFDEDDSEPVLKGVKLHYT

SEQ ID NO: 282 - protein, 1269 aa, synthetic construct
MFVFLVLLPLVSSQCVNLITRTQSYTNSFTRGVYYPDKVFRSSVLHSTQDLFLPFFSNVTWFHAIHVSGTNGTKRFDNPALPFNDGVYFASTEKSNIIRGWIFGTTLDSKTQSLLIVNNATNVVIKVCEFQFCNDPFLDVYQKNNKSWMESEFRVYSSANNCTFEYVSQPFLMDLEGKEGNFKNLREFVFKNIDGYFKIYSKHTPINLERDLPQGFSALEPLVDLPIGINITRFQTLLALHRSYLTPGGSSSGWTAGAAAYYVGYLQPRTFLLKYNENGTITDAVDCALDPLSETKCTLKSFTVEKGIYQTSNFRVQPTESIVRFPNITNLCPFHEVFNATTFASVYAWNRKRISNCVADYSVIYNFAPFFAFKCYGVSPTKLNDLCFTNVYADSFVIRGNEVSQIAPGQTGNIADYNYKLPDDFTGCVIAWNSNKLDSKPSGNYNYLYRLFRKSKLKPFERDISTEIYQAGNKPCNGVAGPNCYSPLQSYGFRPTYGVGHQPYRVVVLSFELLHASATVCGPKKSTNLVKNKCVNFNFNGLTGTGVLTESNKKFLPFQQFGRDIADTTDAVRDPQTLEILDITPCSFGGVSVITPGTNTSNQVAVLYQGVNCTEVPVAIHADQLTPTWRVYSTGSNVFQTRAGCLIGAEYVNNSYECDIPIGAGICASYQTQTKSHQQAQSVASQSIIAYTMSLGAENSVAYSNNSIAIPTNFTISVTTEILPVSMTKTSVDCTMYICGDSTECSNLLLQYGSFCTQLKRALTGIAVEQDKNTQEVFAQVKQIYKTPPIKYFGGFNFSQILPDPSKPSKRSFIEDLLFNKVTLADAGFIKQYGDCLGDIAARDLICAQKFNGLTVLPPLLTDEMIAQYTSALLAGTITSGWTFGAGAALQIPFAMQMAYRFNGIGVTQNVLYENQKLIANQFNSAIGKIQDSLSSTASALGKLQDVVNHNAQALNTLVKQLSSKFGAISSVLNDILSRLDPPEAEVQIDRLITGRLQSLQTYVTQQLIRAAEIRASANLAATKMSECVLGQSKRVDFCGKGYHLMSFPQSAPHGVVFLHVTYVPAQEKNFTTAPAICHDGKAHFPREGVFVSNGTHWFVTQRNFYEPQIITTDNTFVSGNCDVVIGIVNNTVYDPLQPELDSFKEELDKYFKNHTSPDVDLGDISGINASVVNIQKEIDRLNEVAKNLNESLIDLQELGKYEQYIKWPWYIWLGFIAGLIAIVMVTIMLCCMTSCCSCLKGCCSCGSCCKFDEDDSEPVLKGVKLHYT

SEQ ID NO: 283 - protein, 1256 aa, synthetic construct
QCVNLITRTQSYTNSFTRGVYYPDKVFRSSVLHSTQDLFLPFFSNVTWFHAIHVSGTNGTKRFDNPALPFNDGVYFASTEKSNIIRGWIFGTTLDSKTQSLLIVNNATNVVIKVCEFQFCNDPFLDVYQKNNKSWMESEFRVYSSANNCTFEYVSQPFLMDLEGKEGNFKNLREFVFKNIDGYFKIYSKHTPINLERDLPQGFSALEPLVDLPIGINITRFQTLLALHRSYLTPGGSSSGWTAGAAAYYVGYLQPRTFLLKYNENGTITDAVDCALDPLSETKCTLKSFTVEKGIYQTSNFRVQPTESIVRFPNITNLCPFHEVFNATTFASVYAWNRKRISNCVADYSVIYNFAPFFAFKCYGVSPTKLNDLCFTNVYADSFVIRGNEVSQIAPGQTGNIADYNYKLPDDFTGCVIAWNSNKLDSKPSGNYNYLYRLFRKSKLKPFERDISTEIYQAGNKPCNGVAGPNCYSPLQSYGFRPTYGVGHQPYRVVVLSFELLHASATVCGPKKSTNLVKNKCVNFNFNGLTGTGVLTESNKKFLPFQQFGRDIADTTDAVRDPQTLEILDITPCSFGGVSVITPGTNTSNQVAVLYQGVNCTEVPVAIHADQLTPTWRVYSTGSNVFQTRAGCLIGAEYVNNSYECDIPIGAGICASYQTQTKSHRRARSVASQSIIAYTMSLGAENSVAYSNNSIAIPTNFTISVTTEILPVSMTKTSVDCTMYICGDSTECSNLLLQYGSFCTQLKRALTGIAVEQDKNTQEVFAQVKQIYKTPPIKYFGGFNFSQILPDPSKPSKRSFIEDLLFNKVTLADAGFIKQYGDCLGDIAARDLICAQKFNGLTVLPPLLTDEMIAQYTSALLAGTITSGWTFGAGAALQIPFAMQMAYRFNGIGVTQNVLYENQKLIANQFNSAIGKIQDSLSSTASALGKLQDVVNHNAQALNTLVKQLSSKFGAISSVLNDILSRLDKVEAEVQIDRLITGRLQSLQTYVTQQLIRAAEIRASANLAATKMSECVLGQSKRVDFCGKGYHLMSFPQSAPHGVVFLHVTYVPAQEKNFTTAPAICHDGKAHFPREGVFVSNGTHWFVTQRNFYEPQIITTDNTFVSGNCDVVIGIVNNTVYDPLQPELDSFKEELDKYFKNHTSPDVDLGDISGINASVVNIQKEIDRLNEVAKNLNESLIDLQELGKYEQYIKWPWYIWLGFIAGLIAIVMVTIMLCCMTSCCSCLKGCCSCGSCCKFDEDDSEPVLKGVKLHYT

SEQ ID NO: 284 - protein, 1256 aa, synthetic construct
QCVNLITRTQSYTNSFTRGVYYPDKVFRSSVLHSTQDLFLPFFSNVTWFHAIHVSGTNGTKRFDNPALPFNDGVYFASTEKSNIIRGWIFGTTLDSKTQSLLIVNNATNVVIKVCEFQFCNDPFLDVYQKNNKSWMESEFRVYSSANNCTFEYVSQPFLMDLEGKEGNFKNLREFVFKNIDGYFKIYSKHTPINLERDLPQGFSALEPLVDLPIGINITRFQTLLALHRSYLTPGGSSSGWTAGAAAYYVGYLQPRTFLLKYNENGTITDAVDCALDPLSETKCTLKSFTVEKGIYQTSNFRVQPTESIVRFPNITNLCPFHEVFNATTFASVYAWNRKRISNCVADYSVIYNFAPFFAFKCYGVSPTKLNDLCFTNVYADSFVIRGNEVSQIAPGQTGNIADYNYKLPDDFTGCVIAWNSNKLDSKPSGNYNYLYRLFRKSKLKPFERDISTEIYQAGNKPCNGVAGPNCYSPLQSYGFRPTYGVGHQPYRVVVLSFELLHASATVCGPKKSTNLVKNKCVNFNFNGLTGTGVLTESNKKFLPFQQFGRDIADTTDAVRDPQTLEILDITPCSFGGVSVITPGTNTSNQVAVLYQGVNCTEVPVAIHADQLTPTWRVYSTGSNVFQTRAGCLIGAEYVNNSYECDIPIGAGICASYQTQTKSHQQAQSVASQSIIAYTMSLGAENSVAYSNNSIAIPTNFTISVTTEILPVSMTKTSVDCTMYICGDSTECSNLLLQYGSFCTQLKRALTGIAVEQDKNTQEVFAQVKQIYKTPPIKYFGGFNFSQILPDPSKPSKRSFIEDLLFNKVTLADAGFIKQYGDCLGDIAARDLICAQKFNGLTVLPPLLTDEMIAQYTSALLAGTITSGWTFGAGAALQIPFAMQMAYRFNGIGVTQNVLYENQKLIANQFNSAIGKIQDSLSSTASALGKLQDVVNHNAQALNTLVKQLSSKFGAISSVLNDILSRLDPPEAEVQIDRLITGRLQSLQTYVTQQLIRAAEIRASANLAATKMSECVLGQSKRVDFCGKGYHLMSFPQSAPHGVVFLHVTYVPAQEKNFTTAPAICHDGKAHFPREGVFVSNGTHWFVTQRNFYEPQIITTDNTFVSGNCDVVIGIVNNTVYDPLQPELDSFKEELDKYFKNHTSPDVDLGDISGINASVVNIQKEIDRLNEVAKNLNESLIDLQELGKYEQYIKWPWYIWLGFIAGLIAIVMVTIMLCCMTSCCSCLKGCCSCGSCCKFDEDDSEPVLKGVKLHYT

SEQ ID NO: 285 - protein, 1269 aa, synthetic construct
MFVFLVLLPLVSSQCVNLITRTQSYTNSFTRGVYYPDKVFRSSVLHSTQDLFLPFFSNVTWFHAIHVSGTNGTKRFDNPALPFNDGVYFASTEKSNIIRGWIFGTTLDSKTQSLLIVNNATNVVIKVCEFQFCNDPFLDVYQKNNKSWMESEFRVYSSANNCTFEYVSQPFLMDLEGKEGNFKNLREFVFKNIDGYFKIYSKHTPINLERDLPQGFSALEPLVDLPIGINITRFQTLLALHRSYLTPGGSSSGWTAGAAAYYVGYLQPRTFLLKYNENGTITDAVDCALDPLSETKCTLKSFTVEKGIYQTSNFRVQPTESIVRFPNITNLCPFHEVFNATTFASVYAWNRKRISNCVADYSVIYNFAPFFAFKCYGVSPTKLNDLCFTNVYADSFVIRGNEVSQIAPGQTGNIADYNYKLPDDFTGCVIAWNSNKLDSTPSGNYNYLYRLFRKSKLKPFERDISTEIYQAGNKPCNGVAGPNCYSPLQSYGFRPTYGVGHQPYRVVVLSFELLHASATVCGPKKSTNLVKNKCVNFNFNGLTGTGVLTESNKKFLPFQQFGRDIADTTDAVRDPQTLEILDITPCSFGGVSVITPGTNTSNQVAVLYQGVNCTEVPVAIHADQLTPTWRVYSTGSNVFQTRAGCLIGAEYVNNSYECDIPIGAGICASYQTQTKSHRRARSVASQSIIAYTMSLGAENSVAYSNNSIAIPTNFTISVTTEILPVSMTKTSVDCTMYICGDSTECSNLLLQYGSFCTQLKRALTGIAVEQDKNTQEVFAQVKQIYKTPPIKYFGGFNFSQILPDPSKPSKRSFIEDLLFNKVTLADAGFIKQYGDCLGDIAARDLICAQKFNGLTVLPPLLTDEMIAQYTSALLAGTITSGWTFGAGAALQIPFAMQMAYRFNGIGVTQNVLYENQKLIANQFNSAIGKIQDSLSSTASALGKLQDVVNHNAQALNTLVKQLSSKFGAISSVLNDILSRLDKVEAEVQIDRLITGRLQSLQTYVTQQLIRAAEIRASANLAATKMSECVLGQSKRVDFCGKGYHLMSFPQSAPHGVVFLHVTYVPAQEKNFTTAPAICHDGKAHFPREGVFVSNGTHWFVTQRNFYEPQIITTDNTFVSGNCDVVIGIVNNTVYDPLQPELDSFKEELDKYFKNHTSPDVDLGDISGINASVVNIQKEIDRLNEVAKNLNESLIDLQELGKYEQYIKWPWYIWLGFIAGLIAIVMVTIMLCCMTSCCSCLKGCCSCGSCCKFDEDDSEPVLKGVKLHYT

SEQ ID NO: 286 - protein, 1269 aa, synthetic construct
MFVFLVLLPLVSSQCVNLITRTQSYTNSFTRGVYYPDKVFRSSVLHSTQDLFLPFFSNVTWFHAIHVSGTNGTKRFDNPALPFNDGVYFASTEKSNIIRGWIFGTTLDSKTQSLLIVNNATNVVIKVCEFQFCNDPFLDVYQKNNKSWMESEFRVYSSANNCTFEYVSQPFLMDLEGKEGNFKNLREFVFKNIDGYFKIYSKHTPINLERDLPQGFSALEPLVDLPIGINITRFQTLLALHRSYLTPGGSSSGWTAGAAAYYVGYLQPRTFLLKYNENGTITDAVDCALDPLSETKCTLKSFTVEKGIYQTSNFRVQPTESIVRFPNITNLCPFHEVFNATTFASVYAWNRKRISNCVADYSVIYNFAPFFAFKCYGVSPTKLNDLCFTNVYADSFVIRGNEVSQIAPGQTGNIADYNYKLPDDFTGCVIAWNSNKLDSTPSGNYNYLYRLFRKSKLKPFERDISTEIYQAGNKPCNGVAGPNCYSPLQSYGFRPTYGVGHQPYRVVVLSFELLHASATVCGPKKSTNLVKNKCVNFNFNGLTGTGVLTESNKKFLPFQQFGRDIADTTDAVRDPQTLEILDITPCSFGGVSVITPGTNTSNQVAVLYQGVNCTEVPVAIHADQLTPTWRVYSTGSNVFQTRAGCLIGAEYVNNSYECDIPIGAGICASYQTQTKSHQQAQSVASQSIIAYTMSLGAENSVAYSNNSIAIPTNFTISVTTEILPVSMTKTSVDCTMYICGDSTECSNLLLQYGSFCTQLKRALTGIAVEQDKNTQEVFAQVKQIYKTPPIKYFGGFNFSQILPDPSKPSKRSFIEDLLFNKVTLADAGFIKQYGDCLGDIAARDLICAQKFNGLTVLPPLLTDEMIAQYTSALLAGTITSGWTFGAGAALQIPFAMQMAYRFNGIGVTQNVLYENQKLIANQFNSAIGKIQDSLSSTASALGKLQDVVNHNAQALNTLVKQLSSKFGAISSVLNDILSRLDPPEAEVQIDRLITGRLQSLQTYVTQQLIRAAEIRASANLAATKMSECVLGQSKRVDFCGKGYHLMSFPQSAPHGVVFLHVTYVPAQEKNFTTAPAICHDGKAHFPREGVFVSNGTHWFVTQRNFYEPQIITTDNTFVSGNCDVVIGIVNNTVYDPLQPELDSFKEELDKYFKNHTSPDVDLGDISGINASVVNIQKEIDRLNEVAKNLNESLIDLQELGKYEQYIKWPWYIWLGFIAGLIAIVMVTIMLCCMTSCCSCLKGCCSCGSCCKFDEDDSEPVLKGVKLHYT

SEQ ID NO: 287 - protein, 1256 aa, synthetic construct
QCVNLITRTQSYTNSFTRGVYYPDKVFRSSVLHSTQDLFLPFFSNVTWFHAIHVSGTNGTKRFDNPALPFNDGVYFASTEKSNIIRGWIFGTTLDSKTQSLLIVNNATNVVIKVCEFQFCNDPFLDVYQKNNKSWMESEFRVYSSANNCTFEYVSQPFLMDLEGKEGNFKNLREFVFKNIDGYFKIYSKHTPINLERDLPQGFSALEPLVDLPIGINITRFQTLLALHRSYLTPGGSSSGWTAGAAAYYVGYLQPRTFLLKYNENGTITDAVDCALDPLSETKCTLKSFTVEKGIYQTSNFRVQPTESIVRFPNITNLCPFHEVFNATTFASVYAWNRKRISNCVADYSVIYNFAPFFAFKCYGVSPTKLNDLCFTNVYADSFVIRGNEVSQIAPGQTGNIADYNYKLPDDFTGCVIAWNSNKLDSTPSGNYNYLYRLFRKSKLKPFERDISTEIYQAGNKPCNGVAGPNCYSPLQSYGFRPTYGVGHQPYRVVVLSFELLHASATVCGPKKSTNLVKNKCVNFNFNGLTGTGVLTESNKKFLPFQQFGRDIADTTDAVRDPQTLEILDITPCSFGGVSVITPGTNTSNQVAVLYQGVNCTEVPVAIHADQLTPTWRVYSTGSNVFQTRAGCLIGAEYVNNSYECDIPIGAGICASYQTQTKSHRRARSVASQSIIAYTMSLGAENSVAYSNNSIAIPTNFTISVTTEILPVSMTKTSVDCTMYICGDSTECSNLLLQYGSFCTQLKRALTGIAVEQDKNTQEVFAQVKQIYKTPPIKYFGGFNFSQILPDPSKPSKRSFIEDLLFNKVTLADAGFIKQYGDCLGDIAARDLICAQKFNGLTVLPPLLTDEMIAQYTSALLAGTITSGWTFGAGAALQIPFAMQMAYRFNGIGVTQNVLYENQKLIANQFNSAIGKIQDSLSSTASALGKLQDVVNHNAQALNTLVKQLSSKFGAISSVLNDILSRLDKVEAEVQIDRLITGRLQSLQTYVTQQLIRAAEIRASANLAATKMSECVLGQSKRVDFCGKGYHLMSFPQSAPHGVVFLHVTYVPAQEKNFTTAPAICHDGKAHFPREGVFVSNGTHWFVTQRNFYEPQIITTDNTFVSGNCDVVIGIVNNTVYDPLQPELDSFKEELDKYFKNHTSPDVDLGDISGINASVVNIQKEIDRLNEVAKNLNESLIDLQELGKYEQYIKWPWYIWLGFIAGLIAIVMVTIMLCCMTSCCSCLKGCCSCGSCCKFDEDDSEPVLKGVKLHYT

SEQ ID NO: 288 - protein, 1256 aa, synthetic construct
QCVNLITRTQSYTNSFTRGVYYPDKVFRSSVLHSTQDLFLPFFSNVTWFHAIHVSGTNGTKRFDNPALPFNDGVYFASTEKSNIIRGWIFGTTLDSKTQSLLIVNNATNVVIKVCEFQFCNDPFLDVYQKNNKSWMESEFRVYSSANNCTFEYVSQPFLMDLEGKEGNFKNLREFVFKNIDGYFKIYSKHTPINLERDLPQGFSALEPLVDLPIGINITRFQTLLALHRSYLTPGGSSSGWTAGAAAYYVGYLQPRTFLLKYNENGTITDAVDCALDPLSETKCTLKSFTVEKGIYQTSNFRVQPTESIVRFPNITNLCPFHEVFNATTFASVYAWNRKRISNCVADYSVIYNFAPFFAFKCYGVSPTKLNDLCFTNVYADSFVIRGNEVSQIAPGQTGNIADYNYKLPDDFTGCVIAWNSNKLDSTPSGNYNYLYRLFRKSKLKPFERDISTEIYQAGNKPCNGVAGPNCYSPLQSYGFRPTYGVGHQPYRVVVLSFELLHASATVCGPKKSTNLVKNKCVNFNFNGLTGTGVLTESNKKFLPFQQFGRDIADTTDAVRDPQTLEILDITPCSFGGVSVITPGTNTSNQVAVLYQGVNCTEVPVAIHADQLTPTWRVYSTGSNVFQTRAGCLIGAEYVNNSYECDIPIGAGICASYQTQTKSHQQAQSVASQSIIAYTMSLGAENSVAYSNNSIAIPTNFTISVTTEILPVSMTKTSVDCTMYICGDSTECSNLLLQYGSFCTQLKRALTGIAVEQDKNTQEVFAQVKQIYKTPPIKYFGGFNFSQILPDPSKPSKRSFIEDLLFNKVTLADAGFIKQYGDCLGDIAARDLICAQKFNGLTVLPPLLTDEMIAQYTSALLAGTITSGWTFGAGAALQIPFAMQMAYRFNGIGVTQNVLYENQKLIANQFNSAIGKIQDSLSSTASALGKLQDVVNHNAQALNTLVKQLSSKFGAISSVLNDILSRLDPPEAEVQIDRLITGRLQSLQTYVTQQLIRAAEIRASANLAATKMSECVLGQSKRVDFCGKGYHLMSFPQSAPHGVVFLHVTYVPAQEKNFTTAPAICHDGKAHFPREGVFVSNGTHWFVTQRNFYEPQIITTDNTFVSGNCDVVIGIVNNTVYDPLQPELDSFKEELDKYFKNHTSPDVDLGDISGINASVVNIQKEIDRLNEVAKNLNESLIDLQELGKYEQYIKWPWYIWLGFIAGLIAIVMVTIMLCCMTSCCSCLKGCCSCGSCCKFDEDDSEPVLKGVKLHYT

SEQ ID NO: 289 - protein, 1269 aa, synthetic construct
MFVFLVLLPLVSSQCVNLITRTQSYTNSFTRGVYYPDKVFRSSVLHSTQDLFLPFFSNVTWFHAIHVSGTNGTKRFDNPALPFNDGVYFASTEKSNIIRGWIFGTTLDSKTQSLLIVNNATNVVIKVCEFQFCNDPFLDVYQKNNKSWMESEFRVYSSANNCTFEYVSQPFLMDLEGKEGNFKNLREFVFKNIDGYFKIYSKHTPINLERDLPQGFSALEPLVDLPIGINITRFQTLLALHRSYLTPGGSSSGWTAGAAAYYVGYLQPRTFLLKYNENGTITDAVDCALDPLSETKCTLKSFTVEKGIYQTSNFRVQPTESIVRFPNITNLCPFHEVFNATTFASVYAWNRKRISNCVADYSVIYNFAPFFAFKCYGVSPTKLNDLCFTNVYADSFVIRGNEVSQIAPGQTGNIADYNYKLPDDFTGCVIAWNSNKLDSKPSGNYNYLYRLFRKSKLKPFERDISTEIYQAGNKPCNGVAGSNCYSPLQSYGFRPTYGVGHQPYRVVVLSFELLHASATVCGPKKSTNLVKNKCVNFNFNGLTGTGVLTESNKKFLPFQQFGRDIADTTDAVRDPQTLEILDITPCSFGGVSVITPGTNTSNQVAVLYQGVNCTEVPVAIHADQLTPTWRVYSTGSNVFQTRAGCLIGAEYVNNSYECDIPIGAGICASYQTQTKSHRRARSVASQSIIAYTMSLGAENSVAYSNNSIAIPTNFTISVTTEILPVSMTKTSVDCTMYICGDSTECSNLLLQYGSFCTQLKRALTGIAVEQDKNTQEVFAQVKQIYKTPPIKYFGGFNFSQILPDPSKPSKRSFIEDLLFNKVTLADAGFIKQYGDCLGDIAARDLICAQKFNGLTVLPPLLTDEMIAQYTSALLAGTITSGWTFGAGAALQIPFAMQMAYRFNGIGVTQNVLYENQKLIANQFNSAIGKIQDSLSSTASALGKLQDVVNHNAQALNTLVKQLSSKFGAISSVLNDILSRLDKVEAEVQIDRLITGRLQSLQTYVTQQLIRAAEIRASANLAATKMSECVLGQSKRVDFCGKGYHLMSFPQSAPHGVVFLHVTYVPAQEKNFTTAPAICHDGKAHFPREGVFVSNGTHWFVTQRNFYEPQIITTDNTFVSGNCDVVIGIVNNTVYDPLQPELDSFKEELDKYFKNHTSPDVDLGDISGINASVVNIQKEIDRLNEVAKNLNESLIDLQELGKYEQYIKWPWYIWLGFIAGLIAIVMVTIMLCCMTSCCSCLKGCCSCGSCCKFDEDDSEPVLKGVKLHYT

SEQ ID NO: 290 - protein, 1269 aa, synthetic construct
MFVFLVLLPLVSSQCVNLITRTQSYTNSFTRGVYYPDKVFRSSVLHSTQDLFLPFFSNVTWFHAIHVSGTNGTKRFDNPALPFNDGVYFASTEKSNIIRGWIFGTTLDSKTQSLLIVNNATNVVIKVCEFQFCNDPFLDVYQKNNKSWMESEFRVYSSANNCTFEYVSQPFLMDLEGKEGNFKNLREFVFKNIDGYFKIYSKHTPINLERDLPQGFSALEPLVDLPIGINITRFQTLLALHRSYLTPGGSSSGWTAGAAAYYVGYLQPRTFLLKYNENGTITDAVDCALDPLSETKCTLKSFTVEKGIYQTSNFRVQPTESIVRFPNITNLCPFHEVFNATTFASVYAWNRKRISNCVADYSVIYNFAPFFAFKCYGVSPTKLNDLCFTNVYADSFVIRGNEVSQIAPGQTGNIADYNYKLPDDFTGCVIAWNSNKLDSKPSGNYNYLYRLFRKSKLKPFERDISTEIYQAGNKPCNGVAGSNCYSPLQSYGFRPTYGVGHQPYRVVVLSFELLHASATVCGPKKSTNLVKNKCVNFNFNGLTGTGVLTESNKKFLPFQQFGRDIADTTDAVRDPQTLEILDITPCSFGGVSVITPGTNTSNQVAVLYQGVNCTEVPVAIHADQLTPTWRVYSTGSNVFQTRAGCLIGAEYVNNSYECDIPIGAGICASYQTQTKSHQQAQSVASQSIIAYTMSLGAENSVAYSNNSIAIPTNFTISVTTEILPVSMTKTSVDCTMYICGDSTECSNLLLQYGSFCTQLKRALTGIAVEQDKNTQEVFAQVKQIYKTPPIKYFGGFNFSQILPDPSKPSKRSFIEDLLFNKVTLADAGFIKQYGDCLGDIAARDLICAQKFNGLTVLPPLLTDEMIAQYTSALLAGTITSGWTFGAGAALQIPFAMQMAYRFNGIGVTQNVLYENQKLIANQFNSAIGKIQDSLSSTASALGKLQDVVNHNAQALNTLVKQLSSKFGAISSVLNDILSRLDPPEAEVQIDRLITGRLQSLQTYVTQQLIRAAEIRASANLAATKMSECVLGQSKRVDFCGKGYHLMSFPQSAPHGVVFLHVTYVPAQEKNFTTAPAICHDGKAHFPREGVFVSNGTHWFVTQRNFYEPQIITTDNTFVSGNCDVVIGIVNNTVYDPLQPELDSFKEELDKYFKNHTSPDVDLGDISGINASVVNIQKEIDRLNEVAKNLNESLIDLQELGKYEQYIKWPWYIWLGFIAGLIAIVMVTIMLCCMTSCCSCLKGCCSCGSCCKFDEDDSEPVLKGVKLHYT

SEQ ID NO: 291 - protein, 1256 aa, synthetic construct
QCVNLITRTQSYTNSFTRGVYYPDKVFRSSVLHSTQDLFLPFFSNVTWFHAIHVSGTNGTKRFDNPALPFNDGVYFASTEKSNIIRGWIFGTTLDSKTQSLLIVNNATNVVIKVCEFQFCNDPFLDVYQKNNKSWMESEFRVYSSANNCTFEYVSQPFLMDLEGKEGNFKNLREFVFKNIDGYFKIYSKHTPINLERDLPQGFSALEPLVDLPIGINITRFQTLLALHRSYLTPGGSSSGWTAGAAAYYVGYLQPRTFLLKYNENGTITDAVDCALDPLSETKCTLKSFTVEKGIYQTSNFRVQPTESIVRFPNITNLCPFHEVFNATTFASVYAWNRKRISNCVADYSVIYNFAPFFAFKCYGVSPTKLNDLCFTNVYADSFVIRGNEVSQIAPGQTGNIADYNYKLPDDFTGCVIAWNSNKLDSKPSGNYNYLYRLFRKSKLKPFERDISTEIYQAGNKPCNGVAGSNCYSPLQSYGFRPTYGVGHQPYRVVVLSFELLHASATVCGPKKSTNLVKNKCVNFNFNGLTGTGVLTESNKKFLPFQQFGRDIADTTDAVRDPQTLEILDITPCSFGGVSVITPGTNTSNQVAVLYQGVNCTEVPVAIHADQLTPTWRVYSTGSNVFQTRAGCLIGAEYVNNSYECDIPIGAGICASYQTQTKSHRRARSVASQSIIAYTMSLGAENSVAYSNNSIAIPTNFTISVTTEILPVSMTKTSVDCTMYICGDSTECSNLLLQYGSFCTQLKRALTGIAVEQDKNTQEVFAQVKQIYKTPPIKYFGGFNFSQILPDPSKPSKRSFIEDLLFNKVTLADAGFIKQYGDCLGDIAARDLICAQKFNGLTVLPPLLTDEMIAQYTSALLAGTITSGWTFGAGAALQIPFAMQMAYRFNGIGVTQNVLYENQKLIANQFNSAIGKIQDSLSSTASALGKLQDVVNHNAQALNTLVKQLSSKFGAISSVLNDILSRLDKVEAEVQIDRLITGRLQSLQTYVTQQLIRAAEIRASANLAATKMSECVLGQSKRVDFCGKGYHLMSFPQSAPHGVVFLHVTYVPAQEKNFTTAPAICHDGKAHFPREGVFVSNGTHWFVTQRNFYEPQIITTDNTFVSGNCDVVIGIVNNTVYDPLQPELDSFKEELDKYFKNHTSPDVDLGDISGINASVVNIQKEIDRLNEVAKNLNESLIDLQELGKYEQYIKWPWYIWLGFIAGLIAIVMVTIMLCCMTSCCSCLKGCCSCGSCCKFDEDDSEPVLKGVKLHYT

SEQ ID NO: 292 - protein, 1256 aa, synthetic construct
QCVNLITRTQSYTNSFTRGVYYPDKVFRSSVLHSTQDLFLPFFSNVTWFHAIHVSGTNGTKRFDNPALPFNDGVYFASTEKSNIIRGWIFGTTLDSKTQSLLIVNNATNVVIKVCEFQFCNDPFLDVYQKNNKSWMESEFRVYSSANNCTFEYVSQPFLMDLEGKEGNFKNLREFVFKNIDGYFKIYSKHTPINLERDLPQGFSALEPLVDLPIGINITRFQTLLALHRSYLTPGGSSSGWTAGAAAYYVGYLQPRTFLLKYNENGTITDAVDCALDPLSETKCTLKSFTVEKGIYQTSNFRVQPTESIVRFPNITNLCPFHEVFNATTFASVYAWNRKRISNCVADYSVIYNFAPFFAFKCYGVSPTKLNDLCFTNVYADSFVIRGNEVSQIAPGQTGNIADYNYKLPDDFTGCVIAWNSNKLDSKPSGNYNYLYRLFRKSKLKPFERDISTEIYQAGNKPCNGVAGSNCYSPLQSYGFRPTYGVGHQPYRVVVLSFELLHASATVCGPKKSTNLVKNKCVNFNFNGLTGTGVLTESNKKFLPFQQFGRDIADTTDAVRDPQTLEILDITPCSFGGVSVITPGTNTSNQVAVLYQGVNCTEVPVAIHADQLTPTWRVYSTGSNVFQTRAGCLIGAEYVNNSYECDIPIGAGICASYQTQTKSHQQAQSVASQSIIAYTMSLGAENSVAYSNNSIAIPTNFTISVTTEILPVSMTKTSVDCTMYICGDSTECSNLLLQYGSFCTQLKRALTGIAVEQDKNTQEVFAQVKQIYKTPPIKYFGGFNFSQILPDPSKPSKRSFIEDLLFNKVTLADAGFIKQYGDCLGDIAARDLICAQKFNGLTVLPPLLTDEMIAQYTSALLAGTITSGWTFGAGAALQIPFAMQMAYRFNGIGVTQNVLYENQKLIANQFNSAIGKIQDSLSSTASALGKLQDVVNHNAQALNTLVKQLSSKFGAISSVLNDILSRLDPPEAEVQIDRLITGRLQSLQTYVTQQLIRAAEIRASANLAATKMSECVLGQSKRVDFCGKGYHLMSFPQSAPHGVVFLHVTYVPAQEKNFTTAPAICHDGKAHFPREGVFVSNGTHWFVTQRNFYEPQIITTDNTFVSGNCDVVIGIVNNTVYDPLQPELDSFKEELDKYFKNHTSPDVDLGDISGINASVVNIQKEIDRLNEVAKNLNESLIDLQELGKYEQYIKWPWYIWLGFIAGLIAIVMVTIMLCCMTSCCSCLKGCCSCGSCCKFDEDDSEPVLKGVKLHYT

SEQ ID NO: 293 - protein, 1269 aa, Severe acute respiratory syndrome-related coronavirus
MFVFLVLLPLVSSQCVNLITRTQSYTNSFTRGVYYPDKVFRSSVLHSTHDLFLPFFSNVTWFHAIHVSGTNGTKRFDNPALPFNDGVYFASTEKSNIIRGWIFGTTLDSKTQSLLIVNNATNVVIKVCEFQFCNDPFLDVYQKNNKSWMESEFRVYSSANNCTFEYVSQPFLMDLEGKEGNFKNLREFVFKNIDGYFKIYSKHTPINLERDLPQGFSALEPLVDLPIGINITRFQTLLALHRSYLTPVDSSSGWTAGAAAYYVGYLQPRTFLLKYNENGTITDAVDCALDPLSETKCTLKSFTVEKGIYQTSNFRVQPTESIVRFPNITNLCPFHEVFNATTFASVYAWNRKRISNCVADYSVIYNFAPFFAFKCYGVSPTKLNDLCFTNVYADSFVIRGNEVSQIAPGQTGNIADYNYKLPDDFTGCVIAWNSNKLDSKPSGNYNYLYRLLRKSKLKPFERDISTEIYQAGNKPCNGVAGPNCYSPLQSYGFRPTYGVGHQPYRVVVLSFELLHAPATVCGPKKSTNLVKNKCVNFNFNGLTGTGVLTESNKKFLPFQQFGRDIADTTDAVRDPQTLEILDITPCSFGGVSVITPGTNTSNQVAVLYQGVNCTEVPVAIHADQLTPTWRVYSTGSNVFQTRAGCLIGAEYVNNSYECDIPIGAGICASYQTQTKSHRRARSVASQSIIAYTMSLGAENSVAYSNNSIAIPTNFTISVTTEILPVSMTKTSVDCTMYICGDSTECSNLLLQYGSFCTQLKRALTGIAVEQDKNTQEVFAQVKQIYKTPPIKYFGGFNFSQILPDPSKPSKRSFIEDLLFNKVTLADAGFIKQYGDCLGDIAARDLICAQKFNGLTVLPPLLTDEMIAQYTSALLAGTITSGWTFGAGAALQIPFAMQMAYRFNGIGVTQNVLYENQKLIANQFNSAIGKIQDSLSSTASALGKLQDVVNHNAQALNTLVKQLSSKFGAISSVLNDILSRLDKVEAEVQIDRLITGRLQSLQTYVTQQLIRAAEIRASANLAATKMSECVLGQSKRVDFCGKGYHLMSFPQSAPHGVVFLHVTYVPAQEKNFTTAPAICHDGKAHFPREGVFVSNGTHWFVTQRNFYEPQIITTDNTFVSGNCDVVIGIVNNTVYDPLQPELDSFKEELDKYFKNHTSPDVDLGDISGINASVVNIQKEIDRLNEVAKNLNESLIDLQELGKYEQYIKWPWYIWLGFIAGLIAIVMVTIMLCCMTSCCSCLKGCCSCGSCCKFDEDDSEPVLKGVKLHYT

SEQ ID NO: 294 - protein, 1256 aa, Severe acute respiratory syndrome-related coronavirus
QCVNLITRTQSYTNSFTRGVYYPDKVFRSSVLHSTHDLFLPFFSNVTWFHAIHVSGTNGTKRFDNPALPFNDGVYFASTEKSNIIRGWIFGTTLDSKTQSLLIVNNATNVVIKVCEFQFCNDPFLDVYQKNNKSWMESEFRVYSSANNCTFEYVSQPFLMDLEGKEGNFKNLREFVFKNIDGYFKIYSKHTPINLERDLPQGFSALEPLVDLPIGINITRFQTLLALHRSYLTPVDSSSGWTAGAAAYYVGYLQPRTFLLKYNENGTITDAVDCALDPLSETKCTLKSFTVEKGIYQTSNFRVQPTESIVRFPNITNLCPFHEVFNATTFASVYAWNRKRISNCVADYSVIYNFAPFFAFKCYGVSPTKLNDLCFTNVYADSFVIRGNEVSQIAPGQTGNIADYNYKLPDDFTGCVIAWNSNKLDSKPSGNYNYLYRLLRKSKLKPFERDISTEIYQAGNKPCNGVAGPNCYSPLQSYGFRPTYGVGHQPYRVVVLSFELLHAPATVCGPKKSTNLVKNKCVNFNFNGLTGTGVLTESNKKFLPFQQFGRDIADTTDAVRDPQTLEILDITPCSFGGVSVITPGTNTSNQVAVLYQGVNCTEVPVAIHADQLTPTWRVYSTGSNVFQTRAGCLIGAEYVNNSYECDIPIGAGICASYQTQTKSHRRARSVASQSIIAYTMSLGAENSVAYSNNSIAIPTNFTISVTTEILPVSMTKTSVDCTMYICGDSTECSNLLLQYGSFCTQLKRALTGIAVEQDKNTQEVFAQVKQIYKTPPIKYFGGFNFSQILPDPSKPSKRSFIEDLLFNKVTLADAGFIKQYGDCLGDIAARDLICAQKFNGLTVLPPLLTDEMIAQYTSALLAGTITSGWTFGAGAALQIPFAMQMAYRFNGIGVTQNVLYENQKLIANQFNSAIGKIQDSLSSTASALGKLQDVVNHNAQALNTLVKQLSSKFGAISSVLNDILSRLDKVEAEVQIDRLITGRLQSLQTYVTQQLIRAAEIRASANLAATKMSECVLGQSKRVDFCGKGYHLMSFPQSAPHGVVFLHVTYVPAQEKNFTTAPAICHDGKAHFPREGVFVSNGTHWFVTQRNFYEPQIITTDNTFVSGNCDVVIGIVNNTVYDPLQPELDSFKEELDKYFKNHTSPDVDLGDISGINASVVNIQKEIDRLNEVAKNLNESLIDLQELGKYEQYIKWPWYIWLGFIAGLIAIVMVTIMLCCMTSCCSCLKGCCSCGSCCKFDEDDSEPVLKGVKLHYT

SEQ ID NO: 295 - protein, 1269 aa, synthetic construct
MFVFLVLLPLVSSQCVNLITRTQSYTNSFTRGVYYPDKVFRSSVLHSTHDLFLPFFSNVTWFHAIHVSGTNGTKRFDNPALPFNDGVYFASTEKSNIIRGWIFGTTLDSKTQSLLIVNNATNVVIKVCEFQFCNDPFLDVYQKNNKSWMESEFRVYSSANNCTFEYVSQPFLMDLEGKEGNFKNLREFVFKNIDGYFKIYSKHTPINLERDLPQGFSALEPLVDLPIGINITRFQTLLALHRSYLTPVDSSSGWTAGAAAYYVGYLQPRTFLLKYNENGTITDAVDCALDPLSETKCTLKSFTVEKGIYQTSNFRVQPTESIVRFPNITNLCPFHEVFNATTFASVYAWNRKRISNCVADYSVIYNFAPFFAFKCYGVSPTKLNDLCFTNVYADSFVIRGNEVSQIAPGQTGNIADYNYKLPDDFTGCVIAWNSNKLDSKPSGNYNYLYRLLRKSKLKPFERDISTEIYQAGNKPCNGVAGPNCYSPLQSYGFRPTYGVGHQPYRVVVLSFELLHAPATVCGPKKSTNLVKNKCVNFNFNGLTGTGVLTESNKKFLPFQQFGRDIADTTDAVRDPQTLEILDITPCSFGGVSVITPGTNTSNQVAVLYQGVNCTEVPVAIHADQLTPTWRVYSTGSNVFQTRAGCLIGAEYVNNSYECDIPIGAGICASYQTQTKSHQQAQSVASQSIIAYTMSLGAENSVAYSNNSIAIPTNFTISVTTEILPVSMTKTSVDCTMYICGDSTECSNLLLQYGSFCTQLKRALTGIAVEQDKNTQEVFAQVKQIYKTPPIKYFGGFNFSQILPDPSKPSKRSFIEDLLFNKVTLADAGFIKQYGDCLGDIAARDLICAQKFNGLTVLPPLLTDEMIAQYTSALLAGTITSGWTFGAGAALQIPFAMQMAYRFNGIGVTQNVLYENQKLIANQFNSAIGKIQDSLSSTASALGKLQDVVNHNAQALNTLVKQLSSKFGAISSVLNDILSRLDPPEAEVQIDRLITGRLQSLQTYVTQQLIRAAEIRASANLAATKMSECVLGQSKRVDFCGKGYHLMSFPQSAPHGVVFLHVTYVPAQEKNFTTAPAICHDGKAHFPREGVFVSNGTHWFVTQRNFYEPQIITTDNTFVSGNCDVVIGIVNNTVYDPLQPELDSFKEELDKYFKNHTSPDVDLGDISGINASVVNIQKEIDRLNEVAKNLNESLIDLQELGKYEQYIKWPWYIWLGFIAGLIAIVMVTIMLCCMTSCCSCLKGCCSCGSCCKFDEDDSEPVLKGVKLHYT

SEQ ID NO: 296 - protein, 1256 aa, synthetic construct
QCVNLITRTQSYTNSFTRGVYYPDKVFRSSVLHSTHDLFLPFFSNVTWFHAIHVSGTNGTKRFDNPALPFNDGVYFASTEKSNIIRGWIFGTTLDSKTQSLLIVNNATNVVIKVCEFQFCNDPFLDVYQKNNKSWMESEFRVYSSANNCTFEYVSQPFLMDLEGKEGNFKNLREFVFKNIDGYFKIYSKHTPINLERDLPQGFSALEPLVDLPIGINITRFQTLLALHRSYLTPVDSSSGWTAGAAAYYVGYLQPRTFLLKYNENGTITDAVDCALDPLSETKCTLKSFTVEKGIYQTSNFRVQPTESIVRFPNITNLCPFHEVFNATTFASVYAWNRKRISNCVADYSVIYNFAPFFAFKCYGVSPTKLNDLCFTNVYADSFVIRGNEVSQIAPGQTGNIADYNYKLPDDFTGCVIAWNSNKLDSKPSGNYNYLYRLLRKSKLKPFERDISTEIYQAGNKPCNGVAGPNCYSPLQSYGFRPTYGVGHQPYRVVVLSFELLHAPATVCGPKKSTNLVKNKCVNFNFNGLTGTGVLTESNKKFLPFQQFGRDIADTTDAVRDPQTLEILDITPCSFGGVSVITPGTNTSNQVAVLYQGVNCTEVPVAIHADQLTPTWRVYSTGSNVFQTRAGCLIGAEYVNNSYECDIPIGAGICASYQTQTKSHQQAQSVASQSIIAYTMSLGAENSVAYSNNSIAIPTNFTISVTTEILPVSMTKTSVDCTMYICGDSTECSNLLLQYGSFCTQLKRALTGIAVEQDKNTQEVFAQVKQIYKTPPIKYFGGFNFSQILPDPSKPSKRSFIEDLLFNKVTLADAGFIKQYGDCLGDIAARDLICAQKFNGLTVLPPLLTDEMIAQYTSALLAGTITSGWTFGAGAALQIPFAMQMAYRFNGIGVTQNVLYENQKLIANQFNSAIGKIQDSLSSTASALGKLQDVVNHNAQALNTLVKQLSSKFGAISSVLNDILSRLDPPEAEVQIDRLITGRLQSLQTYVTQQLIRAAEIRASANLAATKMSECVLGQSKRVDFCGKGYHLMSFPQSAPHGVVFLHVTYVPAQEKNFTTAPAICHDGKAHFPREGVFVSNGTHWFVTQRNFYEPQIITTDNTFVSGNCDVVIGIVNNTVYDPLQPELDSFKEELDKYFKNHTSPDVDLGDISGINASVVNIQKEIDRLNEVAKNLNESLIDLQELGKYEQYIKWPWYIWLGFIAGLIAIVMVTIMLCCMTSCCSCLKGCCSCGSCCKFDEDDSEPVLKGVKLHYT

SEQ ID NO: 297 - protein, 1269 aa, synthetic construct
MFVFLVLLPLVSSQCVNLITRTQSYTNSFTRGVYYPDKVFRSSVLHSTHDLFLPFFSNVTWFHAIHVSGTNGTKRFDNPALPFNDGVYFASTEKSNIIRGWIFGTTLDSKTQSLLIVNNATNVVIKVCEFQFCNDPFLDVYQKNNKSWMESEFRVYSSANNCTFEYVSQPFLMDLEGKEGNFKNLREFVFKNIDGYFKIYSKHTPINLERDLPQGFSALEPLVDLPIGINITRFQTLLALHRSYLTPVDSSSGWTAGAAAYYVGYLQPRTFLLKYNENGTITDAVDCALDPLSETKCTLKSFTVEKGIYQTSNFRVQPTESIVRFPNITNLCPFHEVFNATTFASVYAWNRKRISNCVADYSVIYNFAPFFAFKCYGVSPTKLNDLCFTNVYADSFVIRGNEVSQIAPGQTGNIADYNYKLPDDFTGCVIAWNSNKLDSKPSGNYNYLYRLLRKSKLKPFERDISTEIYQAGNKPCNGVAGPNCYSPLQSYGFRPTYGVGHQPYRVVVLSFELLHASATVCGPKKSTNLVKNKCVNFNFNGLTGTGVLTESNKKFLPFQQFGRDIADTTDAVRDPQTLEILDITPCSFGGVSVITPGTNTSNQVAVLYQGVNCTEVPVAIHADQLTPTWRVYSTGSNVFQTRAGCLIGAEYVNNSYECDIPIGAGICASYQTQTKSHRRARSVASQSIIAYTMSLGAENSVAYSNNSIAIPTNFTISVTTEILPVSMTKTSVDCTMYICGDSTECSNLLLQYGSFCTQLKRALTGIAVEQDKNTQEVFAQVKQIYKTPPIKYFGGFNFSQILPDPSKPSKRSFIEDLLFNKVTLADAGFIKQYGDCLGDIAARDLICAQKFNGLTVLPPLLTDEMIAQYTSALLAGTITSGWTFGAGAALQIPFAMQMAYRFNGIGVTQNVLYENQKLIANQFNSAIGKIQDSLSSTASALGKLQDVVNHNAQALNTLVKQLSSKFGAISSVLNDILSRLDKVEAEVQIDRLITGRLQSLQTYVTQQLIRAAEIRASANLAATKMSECVLGQSKRVDFCGKGYHLMSFPQSAPHGVVFLHVTYVPAQEKNFTTAPAICHDGKAHFPREGVFVSNGTHWFVTQRNFYEPQIITTDNTFVSGNCDVVIGIVNNTVYDPLQPELDSFKEELDKYFKNHTSPDVDLGDISGINASVVNIQKEIDRLNEVAKNLNESLIDLQELGKYEQYIKWPWYIWLGFIAGLIAIVMVTIMLCCMTSCCSCLKGCCSCGSCCKFDEDDSEPVLKGVKLHYT

SEQ ID NO: 298 - protein, 1256 aa, synthetic construct
QCVNLITRTQSYTNSFTRGVYYPDKVFRSSVLHSTHDLFLPFFSNVTWFHAIHVSGTNGTKRFDNPALPFNDGVYFASTEKSNIIRGWIFGTTLDSKTQSLLIVNNATNVVIKVCEFQFCNDPFLDVYQKNNKSWMESEFRVYSSANNCTFEYVSQPFLMDLEGKEGNFKNLREFVFKNIDGYFKIYSKHTPINLERDLPQGFSALEPLVDLPIGINITRFQTLLALHRSYLTPVDSSSGWTAGAAAYYVGYLQPRTFLLKYNENGTITDAVDCALDPLSETKCTLKSFTVEKGIYQTSNFRVQPTESIVRFPNITNLCPFHEVFNATTFASVYAWNRKRISNCVADYSVIYNFAPFFAFKCYGVSPTKLNDLCFTNVYADSFVIRGNEVSQIAPGQTGNIADYNYKLPDDFTGCVIAWNSNKLDSKPSGNYNYLYRLLRKSKLKPFERDISTEIYQAGNKPCNGVAGPNCYSPLQSYGFRPTYGVGHQPYRVVVLSFELLHASATVCGPKKSTNLVKNKCVNFNFNGLTGTGVLTESNKKFLPFQQFGRDIADTTDAVRDPQTLEILDITPCSFGGVSVITPGTNTSNQVAVLYQGVNCTEVPVAIHADQLTPTWRVYSTGSNVFQTRAGCLIGAEYVNNSYECDIPIGAGICASYQTQTKSHRRARSVASQSIIAYTMSLGAENSVAYSNNSIAIPTNFTISVTTEILPVSMTKTSVDCTMYICGDSTECSNLLLQYGSFCTQLKRALTGIAVEQDKNTQEVFAQVKQIYKTPPIKYFGGFNFSQILPDPSKPSKRSFIEDLLFNKVTLADAGFIKQYGDCLGDIAARDLICAQKFNGLTVLPPLLTDEMIAQYTSALLAGTITSGWTFGAGAALQIPFAMQMAYRFNGIGVTQNVLYENQKLIANQFNSAIGKIQDSLSSTASALGKLQDVVNHNAQALNTLVKQLSSKFGAISSVLNDILSRLDKVEAEVQIDRLITGRLQSLQTYVTQQLIRAAEIRASANLAATKMSECVLGQSKRVDFCGKGYHLMSFPQSAPHGVVFLHVTYVPAQEKNFTTAPAICHDGKAHFPREGVFVSNGTHWFVTQRNFYEPQIITTDNTFVSGNCDVVIGIVNNTVYDPLQPELDSFKEELDKYFKNHTSPDVDLGDISGINASVVNIQKEIDRLNEVAKNLNESLIDLQELGKYEQYIKWPWYIWLGFIAGLIAIVMVTIMLCCMTSCCSCLKGCCSCGSCCKFDEDDSEPVLKGVKLHYT

SEQ ID NO: 299 - protein, 1269 aa, synthetic construct
MFVFLVLLPLVSSQCVNLITRTQSYTNSFTRGVYYPDKVFRSSVLHSTHDLFLPFFSNVTWFHAIHVSGTNGTKRFDNPALPFNDGVYFASTEKSNIIRGWIFGTTLDSKTQSLLIVNNATNVVIKVCEFQFCNDPFLDVYQKNNKSWMESEFRVYSSANNCTFEYVSQPFLMDLEGKEGNFKNLREFVFKNIDGYFKIYSKHTPINLERDLPQGFSALEPLVDLPIGINITRFQTLLALHRSYLTPVDSSSGWTAGAAAYYVGYLQPRTFLLKYNENGTITDAVDCALDPLSETKCTLKSFTVEKGIYQTSNFRVQPTESIVRFPNITNLCPFHEVFNATTFASVYAWNRKRISNCVADYSVIYNFAPFFAFKCYGVSPTKLNDLCFTNVYADSFVIRGNEVSQIAPGQTGNIADYNYKLPDDFTGCVIAWNSNKLDSKPSGNYNYLYRLLRKSKLKPFERDISTEIYQAGNKPCNGVAGPNCYSPLQSYGFRPTYGVGHQPYRVVVLSFELLHASATVCGPKKSTNLVKNKCVNFNFNGLTGTGVLTESNKKFLPFQQFGRDIADTTDAVRDPQTLEILDITPCSFGGVSVITPGTNTSNQVAVLYQGVNCTEVPVAIHADQLTPTWRVYSTGSNVFQTRAGCLIGAEYVNNSYECDIPIGAGICASYQTQTKSHQQAQSVASQSIIAYTMSLGAENSVAYSNNSIAIPTNFTISVTTEILPVSMTKTSVDCTMYICGDSTECSNLLLQYGSFCTQLKRALTGIAVEQDKNTQEVFAQVKQIYKTPPIKYFGGFNFSQILPDPSKPSKRSFIEDLLFNKVTLADAGFIKQYGDCLGDIAARDLICAQKFNGLTVLPPLLTDEMIAQYTSALLAGTITSGWTFGAGAALQIPFAMQMAYRFNGIGVTQNVLYENQKLIANQFNSAIGKIQDSLSSTASALGKLQDVVNHNAQALNTLVKQLSSKFGAISSVLNDILSRLDPPEAEVQIDRLITGRLQSLQTYVTQQLIRAAEIRASANLAATKMSECVLGQSKRVDFCGKGYHLMSFPQSAPHGVVFLHVTYVPAQEKNFTTAPAICHDGKAHFPREGVFVSNGTHWFVTQRNFYEPQIITTDNTFVSGNCDVVIGIVNNTVYDPLQPELDSFKEELDKYFKNHTSPDVDLGDISGINASVVNIQKEIDRLNEVAKNLNESLIDLQELGKYEQYIKWPWYIWLGFIAGLIAIVMVTIMLCCMTSCCSCLKGCCSCGSCCKFDEDDSEPVLKGVKLHYT

SEQ ID NO: 300 - protein, 1256 aa, synthetic construct
QCVNLITRTQSYTNSFTRGVYYPDKVFRSSVLHSTHDLFLPFFSNVTWFHAIHVSGTNGTKRFDNPALPFNDGVYFASTEKSNIIRGWIFGTTLDSKTQSLLIVNNATNVVIKVCEFQFCNDPFLDVYQKNNKSWMESEFRVYSSANNCTFEYVSQPFLMDLEGKEGNFKNLREFVFKNIDGYFKIYSKHTPINLERDLPQGFSALEPLVDLPIGINITRFQTLLALHRSYLTPVDSSSGWTAGAAAYYVGYLQPRTFLLKYNENGTITDAVDCALDPLSETKCTLKSFTVEKGIYQTSNFRVQPTESIVRFPNITNLCPFHEVFNATTFASVYAWNRKRISNCVADYSVIYNFAPFFAFKCYGVSPTKLNDLCFTNVYADSFVIRGNEVSQIAPGQTGNIADYNYKLPDDFTGCVIAWNSNKLDSKPSGNYNYLYRLLRKSKLKPFERDISTEIYQAGNKPCNGVAGPNCYSPLQSYGFRPTYGVGHQPYRVVVLSFELLHASATVCGPKKSTNLVKNKCVNFNFNGLTGTGVLTESNKKFLPFQQFGRDIADTTDAVRDPQTLEILDITPCSFGGVSVITPGTNTSNQVAVLYQGVNCTEVPVAIHADQLTPTWRVYSTGSNVFQTRAGCLIGAEYVNNSYECDIPIGAGICASYQTQTKSHQQAQSVASQSIIAYTMSLGAENSVAYSNNSIAIPTNFTISVTTEILPVSMTKTSVDCTMYICGDSTECSNLLLQYGSFCTQLKRALTGIAVEQDKNTQEVFAQVKQIYKTPPIKYFGGFNFSQILPDPSKPSKRSFIEDLLFNKVTLADAGFIKQYGDCLGDIAARDLICAQKFNGLTVLPPLLTDEMIAQYTSALLAGTITSGWTFGAGAALQIPFAMQMAYRFNGIGVTQNVLYENQKLIANQFNSAIGKIQDSLSSTASALGKLQDVVNHNAQALNTLVKQLSSKFGAISSVLNDILSRLDPPEAEVQIDRLITGRLQSLQTYVTQQLIRAAEIRASANLAATKMSECVLGQSKRVDFCGKGYHLMSFPQSAPHGVVFLHVTYVPAQEKNFTTAPAICHDGKAHFPREGVFVSNGTHWFVTQRNFYEPQIITTDNTFVSGNCDVVIGIVNNTVYDPLQPELDSFKEELDKYFKNHTSPDVDLGDISGINASVVNIQKEIDRLNEVAKNLNESLIDLQELGKYEQYIKWPWYIWLGFIAGLIAIVMVTIMLCCMTSCCSCLKGCCSCGSCCKFDEDDSEPVLKGVKLHYT

SEQ ID NO: 301 - protein, 1269 aa, synthetic construct
MFVFLVLLPLVSSQCVNLITRTQSYTNSFTRGVYYPDKVFRSSVLHSTHDLFLPFFSNVTWFHAIHVSGTNGTKRFDNPALPFNDGVYFASTEKSNIIRGWIFGTTLDSKTQSLLIVNNATNVVIKVCEFQFCNDPFLDVYQKNNKSWMESEFRVYSSANNCTFEYVSQPFLMDLEGKEGNFKNLREFVFKNIDGYFKIYSKHTPINLERDLPQGFSALEPLVDLPIGINITRFQTLLALHRSYLTPVDSSSGWTAGAAAYYVGYLQPRTFLLKYNENGTITDAVDCALDPLSETKCTLKSFTVEKGIYQTSNFRVQPTESIVRFPNITNLCPFHEVFNATTFASVYAWNRKRISNCVADYSVIYNFAPFFAFKCYGVSPTKLNDLCFTNVYADSFVIRGNEVSQIAPGQTGNIADYNYKLPDDFTGCVIAWNSNKLDSTPSGNYNYLYRLLRKSKLKPFERDISTEIYQAGNKPCNGVAGPNCYSPLQSYGFRPTYGVGHQPYRVVVLSFELLHAPATVCGPKKSTNLVKNKCVNFNFNGLTGTGVLTESNKKFLPFQQFGRDIADTTDAVRDPQTLEILDITPCSFGGVSVITPGTNTSNQVAVLYQGVNCTEVPVAIHADQLTPTWRVYSTGSNVFQTRAGCLIGAEYVNNSYECDIPIGAGICASYQTQTKSHRRARSVASQSIIAYTMSLGAENSVAYSNNSIAIPTNFTISVTTEILPVSMTKTSVDCTMYICGDSTECSNLLLQYGSFCTQLKRALTGIAVEQDKNTQEVFAQVKQIYKTPPIKYFGGFNFSQILPDPSKPSKRSFIEDLLFNKVTLADAGFIKQYGDCLGDIAARDLICAQKFNGLTVLPPLLTDEMIAQYTSALLAGTITSGWTFGAGAALQIPFAMQMAYRFNGIGVTQNVLYENQKLIANQFNSAIGKIQDSLSSTASALGKLQDVVNHNAQALNTLVKQLSSKFGAISSVLNDILSRLDKVEAEVQIDRLITGRLQSLQTYVTQQLIRAAEIRASANLAATKMSECVLGQSKRVDFCGKGYHLMSFPQSAPHGVVFLHVTYVPAQEKNFTTAPAICHDGKAHFPREGVFVSNGTHWFVTQRNFYEPQIITTDNTFVSGNCDVVIGIVNNTVYDPLQPELDSFKEELDKYFKNHTSPDVDLGDISGINASVVNIQKEIDRLNEVAKNLNESLIDLQELGKYEQYIKWPWYIWLGFIAGLIAIVMVTIMLCCMTSCCSCLKGCCSCGSCCKFDEDDSEPVLKGVKLHYT

SEQ ID NO: 302 - protein, 1256 aa, synthetic construct
QCVNLITRTQSYTNSFTRGVYYPDKVFRSSVLHSTHDLFLPFFSNVTWFHAIHVSGTNGTKRFDNPALPFNDGVYFASTEKSNIIRGWIFGTTLDSKTQSLLIVNNATNVVIKVCEFQFCNDPFLDVYQKNNKSWMESEFRVYSSANNCTFEYVSQPFLMDLEGKEGNFKNLREFVFKNIDGYFKIYSKHTPINLERDLPQGFSALEPLVDLPIGINITRFQTLLALHRSYLTPVDSSSGWTAGAAAYYVGYLQPRTFLLKYNENGTITDAVDCALDPLSETKCTLKSFTVEKGIYQTSNFRVQPTESIVRFPNITNLCPFHEVFNATTFASVYAWNRKRISNCVADYSVIYNFAPFFAFKCYGVSPTKLNDLCFTNVYADSFVIRGNEVSQIAPGQTGNIADYNYKLPDDFTGCVIAWNSNKLDSTPSGNYNYLYRLLRKSKLKPFERDISTEIYQAGNKPCNGVAGPNCYSPLQSYGFRPTYGVGHQPYRVVVLSFELLHAPATVCGPKKSTNLVKNKCVNFNFNGLTGTGVLTESNKKFLPFQQFGRDIADTTDAVRDPQTLEILDITPCSFGGVSVITPGTNTSNQVAVLYQGVNCTEVPVAIHADQLTPTWRVYSTGSNVFQTRAGCLIGAEYVNNSYECDIPIGAGICASYQTQTKSHRRARSVASQSIIAYTMSLGAENSVAYSNNSIAIPTNFTISVTTEILPVSMTKTSVDCTMYICGDSTECSNLLLQYGSFCTQLKRALTGIAVEQDKNTQEVFAQVKQIYKTPPIKYFGGFNFSQILPDPSKPSKRSFIEDLLFNKVTLADAGFIKQYGDCLGDIAARDLICAQKFNGLTVLPPLLTDEMIAQYTSALLAGTITSGWTFGAGAALQIPFAMQMAYRFNGIGVTQNVLYENQKLIANQFNSAIGKIQDSLSSTASALGKLQDVVNHNAQALNTLVKQLSSKFGAISSVLNDILSRLDKVEAEVQIDRLITGRLQSLQTYVTQQLIRAAEIRASANLAATKMSECVLGQSKRVDFCGKGYHLMSFPQSAPHGVVFLHVTYVPAQEKNFTTAPAICHDGKAHFPREGVFVSNGTHWFVTQRNFYEPQIITTDNTFVSGNCDVVIGIVNNTVYDPLQPELDSFKEELDKYFKNHTSPDVDLGDISGINASVVNIQKEIDRLNEVAKNLNESLIDLQELGKYEQYIKWPWYIWLGFIAGLIAIVMVTIMLCCMTSCCSCLKGCCSCGSCCKFDEDDSEPVLKGVKLHYT

SEQ ID NO: 303 - protein, 1269 aa, synthetic construct
MFVFLVLLPLVSSQCVNLITRTQSYTNSFTRGVYYPDKVFRSSVLHSTHDLFLPFFSNVTWFHAIHVSGTNGTKRFDNPALPFNDGVYFASTEKSNIIRGWIFGTTLDSKTQSLLIVNNATNVVIKVCEFQFCNDPFLDVYQKNNKSWMESEFRVYSSANNCTFEYVSQPFLMDLEGKEGNFKNLREFVFKNIDGYFKIYSKHTPINLERDLPQGFSALEPLVDLPIGINITRFQTLLALHRSYLTPVDSSSGWTAGAAAYYVGYLQPRTFLLKYNENGTITDAVDCALDPLSETKCTLKSFTVEKGIYQTSNFRVQPTESIVRFPNITNLCPFHEVFNATTFASVYAWNRKRISNCVADYSVIYNFAPFFAFKCYGVSPTKLNDLCFTNVYADSFVIRGNEVSQIAPGQTGNIADYNYKLPDDFTGCVIAWNSNKLDSTPSGNYNYLYRLLRKSKLKPFERDISTEIYQAGNKPCNGVAGPNCYSPLQSYGFRPTYGVGHQPYRVVVLSFELLHAPATVCGPKKSTNLVKNKCVNFNFNGLTGTGVLTESNKKFLPFQQFGRDIADTTDAVRDPQTLEILDITPCSFGGVSVITPGTNTSNQVAVLYQGVNCTEVPVAIHADQLTPTWRVYSTGSNVFQTRAGCLIGAEYVNNSYECDIPIGAGICASYQTQTKSHQQAQSVASQSIIAYTMSLGAENSVAYSNNSIAIPTNFTISVTTEILPVSMTKTSVDCTMYICGDSTECSNLLLQYGSFCTQLKRALTGIAVEQDKNTQEVFAQVKQIYKTPPIKYFGGFNFSQILPDPSKPSKRSFIEDLLFNKVTLADAGFIKQYGDCLGDIAARDLICAQKFNGLTVLPPLLTDEMIAQYTSALLAGTITSGWTFGAGAALQIPFAMQMAYRFNGIGVTQNVLYENQKLIANQFNSAIGKIQDSLSSTASALGKLQDVVNHNAQALNTLVKQLSSKFGAISSVLNDILSRLDPPEAEVQIDRLITGRLQSLQTYVTQQLIRAAEIRASANLAATKMSECVLGQSKRVDFCGKGYHLMSFPQSAPHGVVFLHVTYVPAQEKNFTTAPAICHDGKAHFPREGVFVSNGTHWFVTQRNFYEPQIITTDNTFVSGNCDVVIGIVNNTVYDPLQPELDSFKEELDKYFKNHTSPDVDLGDISGINASVVNIQKEIDRLNEVAKNLNESLIDLQELGKYEQYIKWPWYIWLGFIAGLIAIVMVTIMLCCMTSCCSCLKGCCSCGSCCKFDEDDSEPVLKGVKLHYT

SEQ ID NO: 304 - protein, 1256 aa, synthetic construct
QCVNLITRTQSYTNSFTRGVYYPDKVFRSSVLHSTHDLFLPFFSNVTWFHAIHVSGTNGTKRFDNPALPFNDGVYFASTEKSNIIRGWIFGTTLDSKTQSLLIVNNATNVVIKVCEFQFCNDPFLDVYQKNNKSWMESEFRVYSSANNCTFEYVSQPFLMDLEGKEGNFKNLREFVFKNIDGYFKIYSKHTPINLERDLPQGFSALEPLVDLPIGINITRFQTLLALHRSYLTPVDSSSGWTAGAAAYYVGYLQPRTFLLKYNENGTITDAVDCALDPLSETKCTLKSFTVEKGIYQTSNFRVQPTESIVRFPNITNLCPFHEVFNATTFASVYAWNRKRISNCVADYSVIYNFAPFFAFKCYGVSPTKLNDLCFTNVYADSFVIRGNEVSQIAPGQTGNIADYNYKLPDDFTGCVIAWNSNKLDSTPSGNYNYLYRLLRKSKLKPFERDISTEIYQAGNKPCNGVAGPNCYSPLQSYGFRPTYGVGHQPYRVVVLSFELLHAPATVCGPKKSTNLVKNKCVNFNFNGLTGTGVLTESNKKFLPFQQFGRDIADTTDAVRDPQTLEILDITPCSFGGVSVITPGTNTSNQVAVLYQGVNCTEVPVAIHADQLTPTWRVYSTGSNVFQTRAGCLIGAEYVNNSYECDIPIGAGICASYQTQTKSHQQAQSVASQSIIAYTMSLGAENSVAYSNNSIAIPTNFTISVTTEILPVSMTKTSVDCTMYICGDSTECSNLLLQYGSFCTQLKRALTGIAVEQDKNTQEVFAQVKQIYKTPPIKYFGGFNFSQILPDPSKPSKRSFIEDLLFNKVTLADAGFIKQYGDCLGDIAARDLICAQKFNGLTVLPPLLTDEMIAQYTSALLAGTITSGWTFGAGAALQIPFAMQMAYRFNGIGVTQNVLYENQKLIANQFNSAIGKIQDSLSSTASALGKLQDVVNHNAQALNTLVKQLSSKFGAISSVLNDILSRLDPPEAEVQIDRLITGRLQSLQTYVTQQLIRAAEIRASANLAATKMSECVLGQSKRVDFCGKGYHLMSFPQSAPHGVVFLHVTYVPAQEKNFTTAPAICHDGKAHFPREGVFVSNGTHWFVTQRNFYEPQIITTDNTFVSGNCDVVIGIVNNTVYDPLQPELDSFKEELDKYFKNHTSPDVDLGDISGINASVVNIQKEIDRLNEVAKNLNESLIDLQELGKYEQYIKWPWYIWLGFIAGLIAIVMVTIMLCCMTSCCSCLKGCCSCGSCCKFDEDDSEPVLKGVKLHYT

SEQ ID NO: 305 - protein, 1269 aa, synthetic construct
MFVFLVLLPLVSSQCVNLITRTQSYTNSFTRGVYYPDKVFRSSVLHSTHDLFLPFFSNVTWFHAIHVSGTNGTKRFDNPALPFNDGVYFASTEKSNIIRGWIFGTTLDSKTQSLLIVNNATNVVIKVCEFQFCNDPFLDVYQKNNKSWMESEFRVYSSANNCTFEYVSQPFLMDLEGKEGNFKNLREFVFKNIDGYFKIYSKHTPINLERDLPQGFSALEPLVDLPIGINITRFQTLLALHRSYLTPVDSSSGWTAGAAAYYVGYLQPRTFLLKYNENGTITDAVDCALDPLSETKCTLKSFTVEKGIYQTSNFRVQPTESIVRFPNITNLCPFHEVFNATTFASVYAWNRKRISNCVADYSVIYNFAPFFAFKCYGVSPTKLNDLCFTNVYADSFVIRGNEVSQIAPGQTGNIADYNYKLPDDFTGCVIAWNSNKLDSKPSGNYNYLYRLLRKSKLKPFERDISTEIYQAGNKPCNGVAGSNCYSPLQSYGFRPTYGVGHQPYRVVVLSFELLHAPATVCGPKKSTNLVKNKCVNFNFNGLTGTGVLTESNKKFLPFQQFGRDIADTTDAVRDPQTLEILDITPCSFGGVSVITPGTNTSNQVAVLYQGVNCTEVPVAIHADQLTPTWRVYSTGSNVFQTRAGCLIGAEYVNNSYECDIPIGAGICASYQTQTKSHRRARSVASQSIIAYTMSLGAENSVAYSNNSIAIPTNFTISVTTEILPVSMTKTSVDCTMYICGDSTECSNLLLQYGSFCTQLKRALTGIAVEQDKNTQEVFAQVKQIYKTPPIKYFGGFNFSQILPDPSKPSKRSFIEDLLFNKVTLADAGFIKQYGDCLGDIAARDLICAQKFNGLTVLPPLLTDEMIAQYTSALLAGTITSGWTFGAGAALQIPFAMQMAYRFNGIGVTQNVLYENQKLIANQFNSAIGKIQDSLSSTASALGKLQDVVNHNAQALNTLVKQLSSKFGAISSVLNDILSRLDKVEAEVQIDRLITGRLQSLQTYVTQQLIRAAEIRASANLAATKMSECVLGQSKRVDFCGKGYHLMSFPQSAPHGVVFLHVTYVPAQEKNFTTAPAICHDGKAHFPREGVFVSNGTHWFVTQRNFYEPQIITTDNTFVSGNCDVVIGIVNNTVYDPLQPELDSFKEELDKYFKNHTSPDVDLGDISGINASVVNIQKEIDRLNEVAKNLNESLIDLQELGKYEQYIKWPWYIWLGFIAGLIAIVMVTIMLCCMTSCCSCLKGCCSCGSCCKFDEDDSEPVLKGVKLHYT

SEQ ID NO: 306 - protein, 1256 aa, synthetic construct
QCVNLITRTQSYTNSFTRGVYYPDKVFRSSVLHSTHDLFLPFFSNVTWFHAIHVSGTNGTKRFDNPALPFNDGVYFASTEKSNIIRGWIFGTTLDSKTQSLLIVNNATNVVIKVCEFQFCNDPFLDVYQKNNKSWMESEFRVYSSANNCTFEYVSQPFLMDLEGKEGNFKNLREFVFKNIDGYFKIYSKHTPINLERDLPQGFSALEPLVDLPIGINITRFQTLLALHRSYLTPVDSSSGWTAGAAAYYVGYLQPRTFLLKYNENGTITDAVDCALDPLSETKCTLKSFTVEKGIYQTSNFRVQPTESIVRFPNITNLCPFHEVFNATTFASVYAWNRKRISNCVADYSVIYNFAPFFAFKCYGVSPTKLNDLCFTNVYADSFVIRGNEVSQIAPGQTGNIADYNYKLPDDFTGCVIAWNSNKLDSKPSGNYNYLYRLLRKSKLKPFERDISTEIYQAGNKPCNGVAGSNCYSPLQSYGFRPTYGVGHQPYRVVVLSFELLHAPATVCGPKKSTNLVKNKCVNFNFNGLTGTGVLTESNKKFLPFQQFGRDIADTTDAVRDPQTLEILDITPCSFGGVSVITPGTNTSNQVAVLYQGVNCTEVPVAIHADQLTPTWRVYSTGSNVFQTRAGCLIGAEYVNNSYECDIPIGAGICASYQTQTKSHRRARSVASQSIIAYTMSLGAENSVAYSNNSIAIPTNFTISVTTEILPVSMTKTSVDCTMYICGDSTECSNLLLQYGSFCTQLKRALTGIAVEQDKNTQEVFAQVKQIYKTPPIKYFGGFNFSQILPDPSKPSKRSFIEDLLFNKVTLADAGFIKQYGDCLGDIAARDLICAQKFNGLTVLPPLLTDEMIAQYTSALLAGTITSGWTFGAGAALQIPFAMQMAYRFNGIGVTQNVLYENQKLIANQFNSAIGKIQDSLSSTASALGKLQDVVNHNAQALNTLVKQLSSKFGAISSVLNDILSRLDKVEAEVQIDRLITGRLQSLQTYVTQQLIRAAEIRASANLAATKMSECVLGQSKRVDFCGKGYHLMSFPQSAPHGVVFLHVTYVPAQEKNFTTAPAICHDGKAHFPREGVFVSNGTHWFVTQRNFYEPQIITTDNTFVSGNCDVVIGIVNNTVYDPLQPELDSFKEELDKYFKNHTSPDVDLGDISGINASVVNIQKEIDRLNEVAKNLNESLIDLQELGKYEQYIKWPWYIWLGFIAGLIAIVMVTIMLCCMTSCCSCLKGCCSCGSCCKFDEDDSEPVLKGVKLHYT

SEQ ID NO: 307 - protein, 1269 aa, synthetic construct
MFVFLVLLPLVSSQCVNLITRTQSYTNSFTRGVYYPDKVFRSSVLHSTHDLFLPFFSNVTWFHAIHVSGTNGTKRFDNPALPFNDGVYFASTEKSNIIRGWIFGTTLDSKTQSLLIVNNATNVVIKVCEFQFCNDPFLDVYQKNNKSWMESEFRVYSSANNCTFEYVSQPFLMDLEGKEGNFKNLREFVFKNIDGYFKIYSKHTPINLERDLPQGFSALEPLVDLPIGINITRFQTLLALHRSYLTPVDSSSGWTAGAAAYYVGYLQPRTFLLKYNENGTITDAVDCALDPLSETKCTLKSFTVEKGIYQTSNFRVQPTESIVRFPNITNLCPFHEVFNATTFASVYAWNRKRISNCVADYSVIYNFAPFFAFKCYGVSPTKLNDLCFTNVYADSFVIRGNEVSQIAPGQTGNIADYNYKLPDDFTGCVIAWNSNKLDSKPSGNYNYLYRLLRKSKLKPFERDISTEIYQAGNKPCNGVAGSNCYSPLQSYGFRPTYGVGHQPYRVVVLSFELLHAPATVCGPKKSTNLVKNKCVNFNFNGLTGTGVLTESNKKFLPFQQFGRDIADTTDAVRDPQTLEILDITPCSFGGVSVITPGTNTSNQVAVLYQGVNCTEVPVAIHADQLTPTWRVYSTGSNVFQTRAGCLIGAEYVNNSYECDIPIGAGICASYQTQTKSHQQAQSVASQSIIAYTMSLGAENSVAYSNNSIAIPTNFTISVTTEILPVSMTKTSVDCTMYICGDSTECSNLLLQYGSFCTQLKRALTGIAVEQDKNTQEVFAQVKQIYKTPPIKYFGGFNFSQILPDPSKPSKRSFIEDLLFNKVTLADAGFIKQYGDCLGDIAARDLICAQKFNGLTVLPPLLTDEMIAQYTSALLAGTITSGWTFGAGAALQIPFAMQMAYRFNGIGVTQNVLYENQKLIANQFNSAIGKIQDSLSSTASALGKLQDVVNHNAQALNTLVKQLSSKFGAISSVLNDILSRLDPPEAEVQIDRLITGRLQSLQTYVTQQLIRAAEIRASANLAATKMSECVLGQSKRVDFCGKGYHLMSFPQSAPHGVVFLHVTYVPAQEKNFTTAPAICHDGKAHFPREGVFVSNGTHWFVTQRNFYEPQIITTDNTFVSGNCDVVIGIVNNTVYDPLQPELDSFKEELDKYFKNHTSPDVDLGDISGINASVVNIQKEIDRLNEVAKNLNESLIDLQELGKYEQYIKWPWYIWLGFIAGLIAIVMVTIMLCCMTSCCSCLKGCCSCGSCCKFDEDDSEPVLKGVKLHYT

SEQ ID NO: 308 - protein, 1256 aa, synthetic construct
QCVNLITRTQSYTNSFTRGVYYPDKVFRSSVLHSTHDLFLPFFSNVTWFHAIHVSGTNGTKRFDNPALPFNDGVYFASTEKSNIIRGWIFGTTLDSKTQSLLIVNNATNVVIKVCEFQFCNDPFLDVYQKNNKSWMESEFRVYSSANNCTFEYVSQPFLMDLEGKEGNFKNLREFVFKNIDGYFKIYSKHTPINLERDLPQGFSALEPLVDLPIGINITRFQTLLALHRSYLTPVDSSSGWTAGAAAYYVGYLQPRTFLLKYNENGTITDAVDCALDPLSETKCTLKSFTVEKGIYQTSNFRVQPTESIVRFPNITNLCPFHEVFNATTFASVYAWNRKRISNCVADYSVIYNFAPFFAFKCYGVSPTKLNDLCFTNVYADSFVIRGNEVSQIAPGQTGNIADYNYKLPDDFTGCVIAWNSNKLDSKPSGNYNYLYRLLRKSKLKPFERDISTEIYQAGNKPCNGVAGSNCYSPLQSYGFRPTYGVGHQPYRVVVLSFELLHAPATVCGPKKSTNLVKNKCVNFNFNGLTGTGVLTESNKKFLPFQQFGRDIADTTDAVRDPQTLEILDITPCSFGGVSVITPGTNTSNQVAVLYQGVNCTEVPVAIHADQLTPTWRVYSTGSNVFQTRAGCLIGAEYVNNSYECDIPIGAGICASYQTQTKSHQQAQSVASQSIIAYTMSLGAENSVAYSNNSIAIPTNFTISVTTEILPVSMTKTSVDCTMYICGDSTECSNLLLQYGSFCTQLKRALTGIAVEQDKNTQEVFAQVKQIYKTPPIKYFGGFNFSQILPDPSKPSKRSFIEDLLFNKVTLADAGFIKQYGDCLGDIAARDLICAQKFNGLTVLPPLLTDEMIAQYTSALLAGTITSGWTFGAGAALQIPFAMQMAYRFNGIGVTQNVLYENQKLIANQFNSAIGKIQDSLSSTASALGKLQDVVNHNAQALNTLVKQLSSKFGAISSVLNDILSRLDPPEAEVQIDRLITGRLQSLQTYVTQQLIRAAEIRASANLAATKMSECVLGQSKRVDFCGKGYHLMSFPQSAPHGVVFLHVTYVPAQEKNFTTAPAICHDGKAHFPREGVFVSNGTHWFVTQRNFYEPQIITTDNTFVSGNCDVVIGIVNNTVYDPLQPELDSFKEELDKYFKNHTSPDVDLGDISGINASVVNIQKEIDRLNEVAKNLNESLIDLQELGKYEQYIKWPWYIWLGFIAGLIAIVMVTIMLCCMTSCCSCLKGCCSCGSCCKFDEDDSEPVLKGVKLHYT

SEQ ID NO: 309 - protein, 1269 aa, Severe acute respiratory syndrome-related coronavirus
MFVFLVLLPLVSSQCVNLITRTQSYTNSFTRGVYYPDKVFRSSVLHSTQDLFLPFFSNVTWFHAIHVSGTNGTKRFDNPALPFNDGVYFASTEKSNIIRGWIFGTTLDSKTQSLLIVNNATNVVIKVCEFQFCNDPFLDVYQKNNKSWMESEFRVYSSANNCTFEYVSQPFLMDLVGKEGNFKNLREFVFKNIDGYFKIYSKHTPINLERDLPQGFSALEPLVDLPIGINITRFQTLLALHRSYLTPVDSSSGWTAGAAAYYVGYLQPRTFLLKYNENGTITDAVDCALDPLSETKCTLKSFTVEKGIYQTSNFRVQPTESIVRFPNITNLCPFHEVFNATTFASVYAWNRKRISNCVADYSVIYNFAPFFAFKCYGVSPTKLNDLCFTNVYADSFVIRGNEVSQIAPGQTGNIADYNYKLPDDFTGCVIAWNSNKLDSKPSGNYNYLYRLLRKSKLKPFERDISTEIYQAGNRPCNGVAGPNCYSPLQSYGFRPTYGVGHQPYRVVVLSFELLHAPATVCGPKKSTNLVKNKCVNFNFNGLTGTGVLTESNKKFLPFQQFGRDIADTTDAVRDPQTLEILDITPCSFGGVSVITPGTNTSNQVAVLYQGVNCTEVPVAIHADQLTPTWRVYSTGSNVFQTRAGCLIGAEYVNNSYECDIPIGAGICASYQTQTKSHRRARSVASQSIIAYTMSLGAENSVAYSNNSIAIPTNFTISVTTEILPVSMTKTSVDCTMYICGDSTECSNLLLQYGSFCTQLKRALTGIAVEQDKNTQEVFAQVKQIYKTPPIKYFGGFNFSQILPDPSKPSKRSFIEDLLFNKVTLADAGFIKQYGDCLGDIAARDLICAQKFNGLTVLPPLLTDEMIAQYTSALLAGTITSGWTFGAGAALQIPFAMQMAYRFNGIGVTQNVLYENQKLIANQFNSAIGKIQDSLSSTASALGKLQDVVNHNAQALNTLVKQLSSKFGAISSVLNDILSRLDKVEAEVQIDRLITGRLQSLQTYVTQQLIRAAEIRASANLAATKMSECVLGQSKRVDFCGKGYHLMSFPQSAPHGVVFLHVTYVPAQEKNFTTAPAICHDGKAHFPREGVFVSNGTHWFVTQRNFYEPQIITTDNTFVSGNCDVVIGIVNNTVYDPLQPELDSFKEELDKYFKNHTSPDVDLGDISGINASVVNIQKEIDRLNEVAKNLNESLIDLQELGKYEQYIKWPWYIWLGFIAGLIAIVMVTIMLCCMTSCCSCLKGCCSCGSCCKFDEDDSEPVLKGVKLHYT

SEQ ID NO: 310 - protein, 1256 aa, Severe acute respiratory syndrome-related coronavirus
QCVNLITRTQSYTNSFTRGVYYPDKVFRSSVLHSTQDLFLPFFSNVTWFHAIHVSGTNGTKRFDNPALPFNDGVYFASTEKSNIIRGWIFGTTLDSKTQSLLIVNNATNVVIKVCEFQFCNDPFLDVYQKNNKSWMESEFRVYSSANNCTFEYVSQPFLMDLVGKEGNFKNLREFVFKNIDGYFKIYSKHTPINLERDLPQGFSALEPLVDLPIGINITRFQTLLALHRSYLTPVDSSSGWTAGAAAYYVGYLQPRTFLLKYNENGTITDAVDCALDPLSETKCTLKSFTVEKGIYQTSNFRVQPTESIVRFPNITNLCPFHEVFNATTFASVYAWNRKRISNCVADYSVIYNFAPFFAFKCYGVSPTKLNDLCFTNVYADSFVIRGNEVSQIAPGQTGNIADYNYKLPDDFTGCVIAWNSNKLDSKPSGNYNYLYRLLRKSKLKPFERDISTEIYQAGNRPCNGVAGPNCYSPLQSYGFRPTYGVGHQPYRVVVLSFELLHAPATVCGPKKSTNLVKNKCVNFNFNGLTGTGVLTESNKKFLPFQQFGRDIADTTDAVRDPQTLEILDITPCSFGGVSVITPGTNTSNQVAVLYQGVNCTEVPVAIHADQLTPTWRVYSTGSNVFQTRAGCLIGAEYVNNSYECDIPIGAGICASYQTQTKSHRRARSVASQSIIAYTMSLGAENSVAYSNNSIAIPTNFTISVTTEILPVSMTKTSVDCTMYICGDSTECSNLLLQYGSFCTQLKRALTGIAVEQDKNTQEVFAQVKQIYKTPPIKYFGGFNFSQILPDPSKPSKRSFIEDLLFNKVTLADAGFIKQYGDCLGDIAARDLICAQKFNGLTVLPPLLTDEMIAQYTSALLAGTITSGWTFGAGAALQIPFAMQMAYRFNGIGVTQNVLYENQKLIANQFNSAIGKIQDSLSSTASALGKLQDVVNHNAQALNTLVKQLSSKFGAISSVLNDILSRLDKVEAEVQIDRLITGRLQSLQTYVTQQLIRAAEIRASANLAATKMSECVLGQSKRVDFCGKGYHLMSFPQSAPHGVVFLHVTYVPAQEKNFTTAPAICHDGKAHFPREGVFVSNGTHWFVTQRNFYEPQIITTDNTFVSGNCDVVIGIVNNTVYDPLQPELDSFKEELDKYFKNHTSPDVDLGDISGINASVVNIQKEIDRLNEVAKNLNESLIDLQELGKYEQYIKWPWYIWLGFIAGLIAIVMVTIMLCCMTSCCSCLKGCCSCGSCCKFDEDDSEPVLKGVKLHYT

SEQ ID NO: 311 - protein, 1269 aa, synthetic construct
MFVFLVLLPLVSSQCVNLITRTQSYTNSFTRGVYYPDKVFRSSVLHSTQDLFLPFFSNVTWFHAIHVSGTNGTKRFDNPALPFNDGVYFASTEKSNIIRGWIFGTTLDSKTQSLLIVNNATNVVIKVCEFQFCNDPFLDVYQKNNKSWMESEFRVYSSANNCTFEYVSQPFLMDLVGKEGNFKNLREFVFKNIDGYFKIYSKHTPINLERDLPQGFSALEPLVDLPIGINITRFQTLLALHRSYLTPVDSSSGWTAGAAAYYVGYLQPRTFLLKYNENGTITDAVDCALDPLSETKCTLKSFTVEKGIYQTSNFRVQPTESIVRFPNITNLCPFHEVFNATTFASVYAWNRKRISNCVADYSVIYNFAPFFAFKCYGVSPTKLNDLCFTNVYADSFVIRGNEVSQIAPGQTGNIADYNYKLPDDFTGCVIAWNSNKLDSKPSGNYNYLYRLLRKSKLKPFERDISTEIYQAGNRPCNGVAGPNCYSPLQSYGFRPTYGVGHQPYRVVVLSFELLHAPATVCGPKKSTNLVKNKCVNFNFNGLTGTGVLTESNKKFLPFQQFGRDIADTTDAVRDPQTLEILDITPCSFGGVSVITPGTNTSNQVAVLYQGVNCTEVPVAIHADQLTPTWRVYSTGSNVFQTRAGCLIGAEYVNNSYECDIPIGAGICASYQTQTKSHQQAQSVASQSIIAYTMSLGAENSVAYSNNSIAIPTNFTISVTTEILPVSMTKTSVDCTMYICGDSTECSNLLLQYGSFCTQLKRALTGIAVEQDKNTQEVFAQVKQIYKTPPIKYFGGFNFSQILPDPSKPSKRSFIEDLLFNKVTLADAGFIKQYGDCLGDIAARDLICAQKFNGLTVLPPLLTDEMIAQYTSALLAGTITSGWTFGAGAALQIPFAMQMAYRFNGIGVTQNVLYENQKLIANQFNSAIGKIQDSLSSTASALGKLQDVVNHNAQALNTLVKQLSSKFGAISSVLNDILSRLDPPEAEVQIDRLITGRLQSLQTYVTQQLIRAAEIRASANLAATKMSECVLGQSKRVDFCGKGYHLMSFPQSAPHGVVFLHVTYVPAQEKNFTTAPAICHDGKAHFPREGVFVSNGTHWFVTQRNFYEPQIITTDNTFVSGNCDVVIGIVNNTVYDPLQPELDSFKEELDKYFKNHTSPDVDLGDISGINASVVNIQKEIDRLNEVAKNLNESLIDLQELGKYEQYIKWPWYIWLGFIAGLIAIVMVTIMLCCMTSCCSCLKGCCSCGSCCKFDEDDSEPVLKGVKLHYT

SEQ ID NO: 312 - protein, 1256 aa, synthetic construct
QCVNLITRTQSYTNSFTRGVYYPDKVFRSSVLHSTQDLFLPFFSNVTWFHAIHVSGTNGTKRFDNPALPFNDGVYFASTEKSNIIRGWIFGTTLDSKTQSLLIVNNATNVVIKVCEFQFCNDPFLDVYQKNNKSWMESEFRVYSSANNCTFEYVSQPFLMDLVGKEGNFKNLREFVFKNIDGYFKIYSKHTPINLERDLPQGFSALEPLVDLPIGINITRFQTLLALHRSYLTPVDSSSGWTAGAAAYYVGYLQPRTFLLKYNENGTITDAVDCALDPLSETKCTLKSFTVEKGIYQTSNFRVQPTESIVRFPNITNLCPFHEVFNATTFASVYAWNRKRISNCVADYSVIYNFAPFFAFKCYGVSPTKLNDLCFTNVYADSFVIRGNEVSQIAPGQTGNIADYNYKLPDDFTGCVIAWNSNKLDSKPSGNYNYLYRLLRKSKLKPFERDISTEIYQAGNRPCNGVAGPNCYSPLQSYGFRPTYGVGHQPYRVVVLSFELLHAPATVCGPKKSTNLVKNKCVNFNFNGLTGTGVLTESNKKFLPFQQFGRDIADTTDAVRDPQTLEILDITPCSFGGVSVITPGTNTSNQVAVLYQGVNCTEVPVAIHADQLTPTWRVYSTGSNVFQTRAGCLIGAEYVNNSYECDIPIGAGICASYQTQTKSHQQAQSVASQSIIAYTMSLGAENSVAYSNNSIAIPTNFTISVTTEILPVSMTKTSVDCTMYICGDSTECSNLLLQYGSFCTQLKRALTGIAVEQDKNTQEVFAQVKQIYKTPPIKYFGGFNFSQILPDPSKPSKRSFIEDLLFNKVTLADAGFIKQYGDCLGDIAARDLICAQKFNGLTVLPPLLTDEMIAQYTSALLAGTITSGWTFGAGAALQIPFAMQMAYRFNGIGVTQNVLYENQKLIANQFNSAIGKIQDSLSSTASALGKLQDVVNHNAQALNTLVKQLSSKFGAISSVLNDILSRLDPPEAEVQIDRLITGRLQSLQTYVTQQLIRAAEIRASANLAATKMSECVLGQSKRVDFCGKGYHLMSFPQSAPHGVVFLHVTYVPAQEKNFTTAPAICHDGKAHFPREGVFVSNGTHWFVTQRNFYEPQIITTDNTFVSGNCDVVIGIVNNTVYDPLQPELDSFKEELDKYFKNHTSPDVDLGDISGINASVVNIQKEIDRLNEVAKNLNESLIDLQELGKYEQYIKWPWYIWLGFIAGLIAIVMVTIMLCCMTSCCSCLKGCCSCGSCCKFDEDDSEPVLKGVKLHYT

SEQ ID NO: 313 - protein, 1269 aa, synthetic construct
MFVFLVLLPLVSSQCVNLITRTQSYTNSFTRGVYYPDKVFRSSVLHSTQDLFLPFFSNVTWFHAIHVSGTNGTKRFDNPALPFNDGVYFASTEKSNIIRGWIFGTTLDSKTQSLLIVNNATNVVIKVCEFQFCNDPFLDVYQKNNKSWMESEFRVYSSANNCTFEYVSQPFLMDLVGKEGNFKNLREFVFKNIDGYFKIYSKHTPINLERDLPQGFSALEPLVDLPIGINITRFQTLLALHRSYLTPVDSSSGWTAGAAAYYVGYLQPRTFLLKYNENGTITDAVDCALDPLSETKCTLKSFTVEKGIYQTSNFRVQPTESIVRFPNITNLCPFHEVFNATTFASVYAWNRKRISNCVADYSVIYNFAPFFAFKCYGVSPTKLNDLCFTNVYADSFVIRGNEVSQIAPGQTGNIADYNYKLPDDFTGCVIAWNSNKLDSKPSGNYNYLYRLLRKSKLKPFERDISTEIYQAGNRPCNGVAGPNCYSPLQSYGFRPTYGVGHQPYRVVVLSFELLHASATVCGPKKSTNLVKNKCVNFNFNGLTGTGVLTESNKKFLPFQQFGRDIADTTDAVRDPQTLEILDITPCSFGGVSVITPGTNTSNQVAVLYQGVNCTEVPVAIHADQLTPTWRVYSTGSNVFQTRAGCLIGAEYVNNSYECDIPIGAGICASYQTQTKSHRRARSVASQSIIAYTMSLGAENSVAYSNNSIAIPTNFTISVTTEILPVSMTKTSVDCTMYICGDSTECSNLLLQYGSFCTQLKRALTGIAVEQDKNTQEVFAQVKQIYKTPPIKYFGGFNFSQILPDPSKPSKRSFIEDLLFNKVTLADAGFIKQYGDCLGDIAARDLICAQKFNGLTVLPPLLTDEMIAQYTSALLAGTITSGWTFGAGAALQIPFAMQMAYRFNGIGVTQNVLYENQKLIANQFNSAIGKIQDSLSSTASALGKLQDVVNHNAQALNTLVKQLSSKFGAISSVLNDILSRLDKVEAEVQIDRLITGRLQSLQTYVTQQLIRAAEIRASANLAATKMSECVLGQSKRVDFCGKGYHLMSFPQSAPHGVVFLHVTYVPAQEKNFTTAPAICHDGKAHFPREGVFVSNGTHWFVTQRNFYEPQIITTDNTFVSGNCDVVIGIVNNTVYDPLQPELDSFKEELDKYFKNHTSPDVDLGDISGINASVVNIQKEIDRLNEVAKNLNESLIDLQELGKYEQYIKWPWYIWLGFIAGLIAIVMVTIMLCCMTSCCSCLKGCCSCGSCCKFDEDDSEPVLKGVKLHYT

SEQ ID NO: 314 - protein, 1256 aa, synthetic construct
QCVNLITRTQSYTNSFTRGVYYPDKVFRSSVLHSTQDLFLPFFSNVTWFHAIHVSGTNGTKRFDNPALPFNDGVYFASTEKSNIIRGWIFGTTLDSKTQSLLIVNNATNVVIKVCEFQFCNDPFLDVYQKNNKSWMESEFRVYSSANNCTFEYVSQPFLMDLVGKEGNFKNLREFVFKNIDGYFKIYSKHTPINLERDLPQGFSALEPLVDLPIGINITRFQTLLALHRSYLTPVDSSSGWTAGAAAYYVGYLQPRTFLLKYNENGTITDAVDCALDPLSETKCTLKSFTVEKGIYQTSNFRVQPTESIVRFPNITNLCPFHEVFNATTFASVYAWNRKRISNCVADYSVIYNFAPFFAFKCYGVSPTKLNDLCFTNVYADSFVIRGNEVSQIAPGQTGNIADYNYKLPDDFTGCVIAWNSNKLDSKPSGNYNYLYRLLRKSKLKPFERDISTEIYQAGNRPCNGVAGPNCYSPLQSYGFRPTYGVGHQPYRVVVLSFELLHASATVCGPKKSTNLVKNKCVNFNFNGLTGTGVLTESNKKFLPFQQFGRDIADTTDAVRDPQTLEILDITPCSFGGVSVITPGTNTSNQVAVLYQGVNCTEVPVAIHADQLTPTWRVYSTGSNVFQTRAGCLIGAEYVNNSYECDIPIGAGICASYQTQTKSHRRARSVASQSIIAYTMSLGAENSVAYSNNSIAIPTNFTISVTTEILPVSMTKTSVDCTMYICGDSTECSNLLLQYGSFCTQLKRALTGIAVEQDKNTQEVFAQVKQIYKTPPIKYFGGFNFSQILPDPSKPSKRSFIEDLLFNKVTLADAGFIKQYGDCLGDIAARDLICAQKFNGLTVLPPLLTDEMIAQYTSALLAGTITSGWTFGAGAALQIPFAMQMAYRFNGIGVTQNVLYENQKLIANQFNSAIGKIQDSLSSTASALGKLQDVVNHNAQALNTLVKQLSSKFGAISSVLNDILSRLDKVEAEVQIDRLITGRLQSLQTYVTQQLIRAAEIRASANLAATKMSECVLGQSKRVDFCGKGYHLMSFPQSAPHGVVFLHVTYVPAQEKNFTTAPAICHDGKAHFPREGVFVSNGTHWFVTQRNFYEPQIITTDNTFVSGNCDVVIGIVNNTVYDPLQPELDSFKEELDKYFKNHTSPDVDLGDISGINASVVNIQKEIDRLNEVAKNLNESLIDLQELGKYEQYIKWPWYIWLGFIAGLIAIVMVTIMLCCMTSCCSCLKGCCSCGSCCKFDEDDSEPVLKGVKLHYT

SEQ ID NO: 315 - protein, 1269 aa, synthetic construct
MFVFLVLLPLVSSQCVNLITRTQSYTNSFTRGVYYPDKVFRSSVLHSTQDLFLPFFSNVTWFHAIHVSGTNGTKRFDNPALPFNDGVYFASTEKSNIIRGWIFGTTLDSKTQSLLIVNNATNVVIKVCEFQFCNDPFLDVYQKNNKSWMESEFRVYSSANNCTFEYVSQPFLMDLVGKEGNFKNLREFVFKNIDGYFKIYSKHTPINLERDLPQGFSALEPLVDLPIGINITRFQTLLALHRSYLTPVDSSSGWTAGAAAYYVGYLQPRTFLLKYNENGTITDAVDCALDPLSETKCTLKSFTVEKGIYQTSNFRVQPTESIVRFPNITNLCPFHEVFNATTFASVYAWNRKRISNCVADYSVIYNFAPFFAFKCYGVSPTKLNDLCFTNVYADSFVIRGNEVSQIAPGQTGNIADYNYKLPDDFTGCVIAWNSNKLDSKPSGNYNYLYRLLRKSKLKPFERDISTEIYQAGNRPCNGVAGPNCYSPLQSYGFRPTYGVGHQPYRVVVLSFELLHASATVCGPKKSTNLVKNKCVNFNFNGLTGTGVLTESNKKFLPFQQFGRDIADTTDAVRDPQTLEILDITPCSFGGVSVITPGTNTSNQVAVLYQGVNCTEVPVAIHADQLTPTWRVYSTGSNVFQTRAGCLIGAEYVNNSYECDIPIGAGICASYQTQTKSHQQAQSVASQSIIAYTMSLGAENSVAYSNNSIAIPTNFTISVTTEILPVSMTKTSVDCTMYICGDSTECSNLLLQYGSFCTQLKRALTGIAVEQDKNTQEVFAQVKQIYKTPPIKYFGGFNFSQILPDPSKPSKRSFIEDLLFNKVTLADAGFIKQYGDCLGDIAARDLICAQKFNGLTVLPPLLTDEMIAQYTSALLAGTITSGWTFGAGAALQIPFAMQMAYRFNGIGVTQNVLYENQKLIANQFNSAIGKIQDSLSSTASALGKLQDVVNHNAQALNTLVKQLSSKFGAISSVLNDILSRLDPPEAEVQIDRLITGRLQSLQTYVTQQLIRAAEIRASANLAATKMSECVLGQSKRVDFCGKGYHLMSFPQSAPHGVVFLHVTYVPAQEKNFTTAPAICHDGKAHFPREGVFVSNGTHWFVTQRNFYEPQIITTDNTFVSGNCDVVIGIVNNTVYDPLQPELDSFKEELDKYFKNHTSPDVDLGDISGINASVVNIQKEIDRLNEVAKNLNESLIDLQELGKYEQYIKWPWYIWLGFIAGLIAIVMVTIMLCCMTSCCSCLKGCCSCGSCCKFDEDDSEPVLKGVKLHYT

SEQ ID NO: 316 - protein, 1256 aa, synthetic construct
QCVNLITRTQSYTNSFTRGVYYPDKVFRSSVLHSTQDLFLPFFSNVTWFHAIHVSGTNGTKRFDNPALPFNDGVYFASTEKSNIIRGWIFGTTLDSKTQSLLIVNNATNVVIKVCEFQFCNDPFLDVYQKNNKSWMESEFRVYSSANNCTFEYVSQPFLMDLVGKEGNFKNLREFVFKNIDGYFKIYSKHTPINLERDLPQGFSALEPLVDLPIGINITRFQTLLALHRSYLTPVDSSSGWTAGAAAYYVGYLQPRTFLLKYNENGTITDAVDCALDPLSETKCTLKSFTVEKGIYQTSNFRVQPTESIVRFPNITNLCPFHEVFNATTFASVYAWNRKRISNCVADYSVIYNFAPFFAFKCYGVSPTKLNDLCFTNVYADSFVIRGNEVSQIAPGQTGNIADYNYKLPDDFTGCVIAWNSNKLDSKPSGNYNYLYRLLRKSKLKPFERDISTEIYQAGNRPCNGVAGPNCYSPLQSYGFRPTYGVGHQPYRVVVLSFELLHASATVCGPKKSTNLVKNKCVNFNFNGLTGTGVLTESNKKFLPFQQFGRDIADTTDAVRDPQTLEILDITPCSFGGVSVITPGTNTSNQVAVLYQGVNCTEVPVAIHADQLTPTWRVYSTGSNVFQTRAGCLIGAEYVNNSYECDIPIGAGICASYQTQTKSHQQAQSVASQSIIAYTMSLGAENSVAYSNNSIAIPTNFTISVTTEILPVSMTKTSVDCTMYICGDSTECSNLLLQYGSFCTQLKRALTGIAVEQDKNTQEVFAQVKQIYKTPPIKYFGGFNFSQILPDPSKPSKRSFIEDLLFNKVTLADAGFIKQYGDCLGDIAARDLICAQKFNGLTVLPPLLTDEMIAQYTSALLAGTITSGWTFGAGAALQIPFAMQMAYRFNGIGVTQNVLYENQKLIANQFNSAIGKIQDSLSSTASALGKLQDVVNHNAQALNTLVKQLSSKFGAISSVLNDILSRLDPPEAEVQIDRLITGRLQSLQTYVTQQLIRAAEIRASANLAATKMSECVLGQSKRVDFCGKGYHLMSFPQSAPHGVVFLHVTYVPAQEKNFTTAPAICHDGKAHFPREGVFVSNGTHWFVTQRNFYEPQIITTDNTFVSGNCDVVIGIVNNTVYDPLQPELDSFKEELDKYFKNHTSPDVDLGDISGINASVVNIQKEIDRLNEVAKNLNESLIDLQELGKYEQYIKWPWYIWLGFIAGLIAIVMVTIMLCCMTSCCSCLKGCCSCGSCCKFDEDDSEPVLKGVKLHYT

SEQ ID NO: 317 - protein, 1269 aa, synthetic construct
MFVFLVLLPLVSSQCVNLITRTQSYTNSFTRGVYYPDKVFRSSVLHSTQDLFLPFFSNVTWFHAIHVSGTNGTKRFDNPALPFNDGVYFASTEKSNIIRGWIFGTTLDSKTQSLLIVNNATNVVIKVCEFQFCNDPFLDVYQKNNKSWMESEFRVYSSANNCTFEYVSQPFLMDLVGKEGNFKNLREFVFKNIDGYFKIYSKHTPINLERDLPQGFSALEPLVDLPIGINITRFQTLLALHRSYLTPVDSSSGWTAGAAAYYVGYLQPRTFLLKYNENGTITDAVDCALDPLSETKCTLKSFTVEKGIYQTSNFRVQPTESIVRFPNITNLCPFHEVFNATTFASVYAWNRKRISNCVADYSVIYNFAPFFAFKCYGVSPTKLNDLCFTNVYADSFVIRGNEVSQIAPGQTGNIADYNYKLPDDFTGCVIAWNSNKLDSTPSGNYNYLYRLLRKSKLKPFERDISTEIYQAGNRPCNGVAGPNCYSPLQSYGFRPTYGVGHQPYRVVVLSFELLHAPATVCGPKKSTNLVKNKCVNFNFNGLTGTGVLTESNKKFLPFQQFGRDIADTTDAVRDPQTLEILDITPCSFGGVSVITPGTNTSNQVAVLYQGVNCTEVPVAIHADQLTPTWRVYSTGSNVFQTRAGCLIGAEYVNNSYECDIPIGAGICASYQTQTKSHRRARSVASQSIIAYTMSLGAENSVAYSNNSIAIPTNFTISVTTEILPVSMTKTSVDCTMYICGDSTECSNLLLQYGSFCTQLKRALTGIAVEQDKNTQEVFAQVKQIYKTPPIKYFGGFNFSQILPDPSKPSKRSFIEDLLFNKVTLADAGFIKQYGDCLGDIAARDLICAQKFNGLTVLPPLLTDEMIAQYTSALLAGTITSGWTFGAGAALQIPFAMQMAYRFNGIGVTQNVLYENQKLIANQFNSAIGKIQDSLSSTASALGKLQDVVNHNAQALNTLVKQLSSKFGAISSVLNDILSRLDKVEAEVQIDRLITGRLQSLQTYVTQQLIRAAEIRASANLAATKMSECVLGQSKRVDFCGKGYHLMSFPQSAPHGVVFLHVTYVPAQEKNFTTAPAICHDGKAHFPREGVFVSNGTHWFVTQRNFYEPQIITTDNTFVSGNCDVVIGIVNNTVYDPLQPELDSFKEELDKYFKNHTSPDVDLGDISGINASVVNIQKEIDRLNEVAKNLNESLIDLQELGKYEQYIKWPWYIWLGFIAGLIAIVMVTIMLCCMTSCCSCLKGCCSCGSCCKFDEDDSEPVLKGVKLHYT

SEQ ID NO: 318 - protein, 1256 aa, synthetic construct
QCVNLITRTQSYTNSFTRGVYYPDKVFRSSVLHSTQDLFLPFFSNVTWFHAIHVSGTNGTKRFDNPALPFNDGVYFASTEKSNIIRGWIFGTTLDSKTQSLLIVNNATNVVIKVCEFQFCNDPFLDVYQKNNKSWMESEFRVYSSANNCTFEYVSQPFLMDLVGKEGNFKNLREFVFKNIDGYFKIYSKHTPINLERDLPQGFSALEPLVDLPIGINITRFQTLLALHRSYLTPVDSSSGWTAGAAAYYVGYLQPRTFLLKYNENGTITDAVDCALDPLSETKCTLKSFTVEKGIYQTSNFRVQPTESIVRFPNITNLCPFHEVFNATTFASVYAWNRKRISNCVADYSVIYNFAPFFAFKCYGVSPTKLNDLCFTNVYADSFVIRGNEVSQIAPGQTGNIADYNYKLPDDFTGCVIAWNSNKLDSTPSGNYNYLYRLLRKSKLKPFERDISTEIYQAGNRPCNGVAGPNCYSPLQSYGFRPTYGVGHQPYRVVVLSFELLHAPATVCGPKKSTNLVKNKCVNFNFNGLTGTGVLTESNKKFLPFQQFGRDIADTTDAVRDPQTLEILDITPCSFGGVSVITPGTNTSNQVAVLYQGVNCTEVPVAIHADQLTPTWRVYSTGSNVFQTRAGCLIGAEYVNNSYECDIPIGAGICASYQTQTKSHRRARSVASQSIIAYTMSLGAENSVAYSNNSIAIPTNFTISVTTEILPVSMTKTSVDCTMYICGDSTECSNLLLQYGSFCTQLKRALTGIAVEQDKNTQEVFAQVKQIYKTPPIKYFGGFNFSQILPDPSKPSKRSFIEDLLFNKVTLADAGFIKQYGDCLGDIAARDLICAQKFNGLTVLPPLLTDEMIAQYTSALLAGTITSGWTFGAGAALQIPFAMQMAYRFNGIGVTQNVLYENQKLIANQFNSAIGKIQDSLSSTASALGKLQDVVNHNAQALNTLVKQLSSKFGAISSVLNDILSRLDKVEAEVQIDRLITGRLQSLQTYVTQQLIRAAEIRASANLAATKMSECVLGQSKRVDFCGKGYHLMSFPQSAPHGVVFLHVTYVPAQEKNFTTAPAICHDGKAHFPREGVFVSNGTHWFVTQRNFYEPQIITTDNTFVSGNCDVVIGIVNNTVYDPLQPELDSFKEELDKYFKNHTSPDVDLGDISGINASVVNIQKEIDRLNEVAKNLNESLIDLQELGKYEQYIKWPWYIWLGFIAGLIAIVMVTIMLCCMTSCCSCLKGCCSCGSCCKFDEDDSEPVLKGVKLHYT

SEQ ID NO: 319 - protein, 1269 aa, synthetic construct
MFVFLVLLPLVSSQCVNLITRTQSYTNSFTRGVYYPDKVFRSSVLHSTQDLFLPFFSNVTWFHAIHVSGTNGTKRFDNPALPFNDGVYFASTEKSNIIRGWIFGTTLDSKTQSLLIVNNATNVVIKVCEFQFCNDPFLDVYQKNNKSWMESEFRVYSSANNCTFEYVSQPFLMDLVGKEGNFKNLREFVFKNIDGYFKIYSKHTPINLERDLPQGFSALEPLVDLPIGINITRFQTLLALHRSYLTPVDSSSGWTAGAAAYYVGYLQPRTFLLKYNENGTITDAVDCALDPLSETKCTLKSFTVEKGIYQTSNFRVQPTESIVRFPNITNLCPFHEVFNATTFASVYAWNRKRISNCVADYSVIYNFAPFFAFKCYGVSPTKLNDLCFTNVYADSFVIRGNEVSQIAPGQTGNIADYNYKLPDDFTGCVIAWNSNKLDSTPSGNYNYLYRLLRKSKLKPFERDISTEIYQAGNRPCNGVAGPNCYSPLQSYGFRPTYGVGHQPYRVVVLSFELLHAPATVCGPKKSTNLVKNKCVNFNFNGLTGTGVLTESNKKFLPFQQFGRDIADTTDAVRDPQTLEILDITPCSFGGVSVITPGTNTSNQVAVLYQGVNCTEVPVAIHADQLTPTWRVYSTGSNVFQTRAGCLIGAEYVNNSYECDIPIGAGICASYQTQTKSHQQAQSVASQSIIAYTMSLGAENSVAYSNNSIAIPTNFTISVTTEILPVSMTKTSVDCTMYICGDSTECSNLLLQYGSFCTQLKRALTGIAVEQDKNTQEVFAQVKQIYKTPPIKYFGGFNFSQILPDPSKPSKRSFIEDLLFNKVTLADAGFIKQYGDCLGDIAARDLICAQKFNGLTVLPPLLTDEMIAQYTSALLAGTITSGWTFGAGAALQIPFAMQMAYRFNGIGVTQNVLYENQKLIANQFNSAIGKIQDSLSSTASALGKLQDVVNHNAQALNTLVKQLSSKFGAISSVLNDILSRLDPPEAEVQIDRLITGRLQSLQTYVTQQLIRAAEIRASANLAATKMSECVLGQSKRVDFCGKGYHLMSFPQSAPHGVVFLHVTYVPAQEKNFTTAPAICHDGKAHFPREGVFVSNGTHWFVTQRNFYEPQIITTDNTFVSGNCDVVIGIVNNTVYDPLQPELDSFKEELDKYFKNHTSPDVDLGDISGINASVVNIQKEIDRLNEVAKNLNESLIDLQELGKYEQYIKWPWYIWLGFIAGLIAIVMVTIMLCCMTSCCSCLKGCCSCGSCCKFDEDDSEPVLKGVKLHYT

SEQ ID NO: 320 - protein, 1256 aa, synthetic construct
QCVNLITRTQSYTNSFTRGVYYPDKVFRSSVLHSTQDLFLPFFSNVTWFHAIHVSGTNGTKRFDNPALPFNDGVYFASTEKSNIIRGWIFGTTLDSKTQSLLIVNNATNVVIKVCEFQFCNDPFLDVYQKNNKSWMESEFRVYSSANNCTFEYVSQPFLMDLVGKEGNFKNLREFVFKNIDGYFKIYSKHTPINLERDLPQGFSALEPLVDLPIGINITRFQTLLALHRSYLTPVDSSSGWTAGAAAYYVGYLQPRTFLLKYNENGTITDAVDCALDPLSETKCTLKSFTVEKGIYQTSNFRVQPTESIVRFPNITNLCPFHEVFNATTFASVYAWNRKRISNCVADYSVIYNFAPFFAFKCYGVSPTKLNDLCFTNVYADSFVIRGNEVSQIAPGQTGNIADYNYKLPDDFTGCVIAWNSNKLDSTPSGNYNYLYRLLRKSKLKPFERDISTEIYQAGNRPCNGVAGPNCYSPLQSYGFRPTYGVGHQPYRVVVLSFELLHAPATVCGPKKSTNLVKNKCVNFNFNGLTGTGVLTESNKKFLPFQQFGRDIADTTDAVRDPQTLEILDITPCSFGGVSVITPGTNTSNQVAVLYQGVNCTEVPVAIHADQLTPTWRVYSTGSNVFQTRAGCLIGAEYVNNSYECDIPIGAGICASYQTQTKSHQQAQSVASQSIIAYTMSLGAENSVAYSNNSIAIPTNFTISVTTEILPVSMTKTSVDCTMYICGDSTECSNLLLQYGSFCTQLKRALTGIAVEQDKNTQEVFAQVKQIYKTPPIKYFGGFNFSQILPDPSKPSKRSFIEDLLFNKVTLADAGFIKQYGDCLGDIAARDLICAQKFNGLTVLPPLLTDEMIAQYTSALLAGTITSGWTFGAGAALQIPFAMQMAYRFNGIGVTQNVLYENQKLIANQFNSAIGKIQDSLSSTASALGKLQDVVNHNAQALNTLVKQLSSKFGAISSVLNDILSRLDPPEAEVQIDRLITGRLQSLQTYVTQQLIRAAEIRASANLAATKMSECVLGQSKRVDFCGKGYHLMSFPQSAPHGVVFLHVTYVPAQEKNFTTAPAICHDGKAHFPREGVFVSNGTHWFVTQRNFYEPQIITTDNTFVSGNCDVVIGIVNNTVYDPLQPELDSFKEELDKYFKNHTSPDVDLGDISGINASVVNIQKEIDRLNEVAKNLNESLIDLQELGKYEQYIKWPWYIWLGFIAGLIAIVMVTIMLCCMTSCCSCLKGCCSCGSCCKFDEDDSEPVLKGVKLHYT

SEQ ID NO: 321 - protein, 1269 aa, synthetic construct
MFVFLVLLPLVSSQCVNLITRTQSYTNSFTRGVYYPDKVFRSSVLHSTQDLFLPFFSNVTWFHAIHVSGTNGTKRFDNPALPFNDGVYFASTEKSNIIRGWIFGTTLDSKTQSLLIVNNATNVVIKVCEFQFCNDPFLDVYQKNNKSWMESEFRVYSSANNCTFEYVSQPFLMDLVGKEGNFKNLREFVFKNIDGYFKIYSKHTPINLERDLPQGFSALEPLVDLPIGINITRFQTLLALHRSYLTPVDSSSGWTAGAAAYYVGYLQPRTFLLKYNENGTITDAVDCALDPLSETKCTLKSFTVEKGIYQTSNFRVQPTESIVRFPNITNLCPFHEVFNATTFASVYAWNRKRISNCVADYSVIYNFAPFFAFKCYGVSPTKLNDLCFTNVYADSFVIRGNEVSQIAPGQTGNIADYNYKLPDDFTGCVIAWNSNKLDSKPSGNYNYLYRLLRKSKLKPFERDISTEIYQAGNRPCNGVAGSNCYSPLQSYGFRPTYGVGHQPYRVVVLSFELLHAPATVCGPKKSTNLVKNKCVNFNFNGLTGTGVLTESNKKFLPFQQFGRDIADTTDAVRDPQTLEILDITPCSFGGVSVITPGTNTSNQVAVLYQGVNCTEVPVAIHADQLTPTWRVYSTGSNVFQTRAGCLIGAEYVNNSYECDIPIGAGICASYQTQTKSHRRARSVASQSIIAYTMSLGAENSVAYSNNSIAIPTNFTISVTTEILPVSMTKTSVDCTMYICGDSTECSNLLLQYGSFCTQLKRALTGIAVEQDKNTQEVFAQVKQIYKTPPIKYFGGFNFSQILPDPSKPSKRSFIEDLLFNKVTLADAGFIKQYGDCLGDIAARDLICAQKFNGLTVLPPLLTDEMIAQYTSALLAGTITSGWTFGAGAALQIPFAMQMAYRFNGIGVTQNVLYENQKLIANQFNSAIGKIQDSLSSTASALGKLQDVVNHNAQALNTLVKQLSSKFGAISSVLNDILSRLDKVEAEVQIDRLITGRLQSLQTYVTQQLIRAAEIRASANLAATKMSECVLGQSKRVDFCGKGYHLMSFPQSAPHGVVFLHVTYVPAQEKNFTTAPAICHDGKAHFPREGVFVSNGTHWFVTQRNFYEPQIITTDNTFVSGNCDVVIGIVNNTVYDPLQPELDSFKEELDKYFKNHTSPDVDLGDISGINASVVNIQKEIDRLNEVAKNLNESLIDLQELGKYEQYIKWPWYIWLGFIAGLIAIVMVTIMLCCMTSCCSCLKGCCSCGSCCKFDEDDSEPVLKGVKLHYT

SEQ ID NO: 322 - protein, 1256 aa, synthetic construct
QCVNLITRTQSYTNSFTRGVYYPDKVFRSSVLHSTQDLFLPFFSNVTWFHAIHVSGTNGTKRFDNPALPFNDGVYFASTEKSNIIRGWIFGTTLDSKTQSLLIVNNATNVVIKVCEFQFCNDPFLDVYQKNNKSWMESEFRVYSSANNCTFEYVSQPFLMDLVGKEGNFKNLREFVFKNIDGYFKIYSKHTPINLERDLPQGFSALEPLVDLPIGINITRFQTLLALHRSYLTPVDSSSGWTAGAAAYYVGYLQPRTFLLKYNENGTITDAVDCALDPLSETKCTLKSFTVEKGIYQTSNFRVQPTESIVRFPNITNLCPFHEVFNATTFASVYAWNRKRISNCVADYSVIYNFAPFFAFKCYGVSPTKLNDLCFTNVYADSFVIRGNEVSQIAPGQTGNIADYNYKLPDDFTGCVIAWNSNKLDSKPSGNYNYLYRLLRKSKLKPFERDISTEIYQAGNRPCNGVAGSNCYSPLQSYGFRPTYGVGHQPYRVVVLSFELLHAPATVCGPKKSTNLVKNKCVNFNFNGLTGTGVLTESNKKFLPFQQFGRDIADTTDAVRDPQTLEILDITPCSFGGVSVITPGTNTSNQVAVLYQGVNCTEVPVAIHADQLTPTWRVYSTGSNVFQTRAGCLIGAEYVNNSYECDIPIGAGICASYQTQTKSHRRARSVASQSIIAYTMSLGAENSVAYSNNSIAIPTNFTISVTTEILPVSMTKTSVDCTMYICGDSTECSNLLLQYGSFCTQLKRALTGIAVEQDKNTQEVFAQVKQIYKTPPIKYFGGFNFSQILPDPSKPSKRSFIEDLLFNKVTLADAGFIKQYGDCLGDIAARDLICAQKFNGLTVLPPLLTDEMIAQYTSALLAGTITSGWTFGAGAALQIPFAMQMAYRFNGIGVTQNVLYENQKLIANQFNSAIGKIQDSLSSTASALGKLQDVVNHNAQALNTLVKQLSSKFGAISSVLNDILSRLDKVEAEVQIDRLITGRLQSLQTYVTQQLIRAAEIRASANLAATKMSECVLGQSKRVDFCGKGYHLMSFPQSAPHGVVFLHVTYVPAQEKNFTTAPAICHDGKAHFPREGVFVSNGTHWFVTQRNFYEPQIITTDNTFVSGNCDVVIGIVNNTVYDPLQPELDSFKEELDKYFKNHTSPDVDLGDISGINASVVNIQKEIDRLNEVAKNLNESLIDLQELGKYEQYIKWPWYIWLGFIAGLIAIVMVTIMLCCMTSCCSCLKGCCSCGSCCKFDEDDSEPVLKGVKLHYT

SEQ ID NO: 323 - protein, 1269 aa, synthetic construct
MFVFLVLLPLVSSQCVNLITRTQSYTNSFTRGVYYPDKVFRSSVLHSTQDLFLPFFSNVTWFHAIHVSGTNGTKRFDNPALPFNDGVYFASTEKSNIIRGWIFGTTLDSKTQSLLIVNNATNVVIKVCEFQFCNDPFLDVYQKNNKSWMESEFRVYSSANNCTFEYVSQPFLMDLVGKEGNFKNLREFVFKNIDGYFKIYSKHTPINLERDLPQGFSALEPLVDLPIGINITRFQTLLALHRSYLTPVDSSSGWTAGAAAYYVGYLQPRTFLLKYNENGTITDAVDCALDPLSETKCTLKSFTVEKGIYQTSNFRVQPTESIVRFPNITNLCPFHEVFNATTFASVYAWNRKRISNCVADYSVIYNFAPFFAFKCYGVSPTKLNDLCFTNVYADSFVIRGNEVSQIAPGQTGNIADYNYKLPDDFTGCVIAWNSNKLDSKPSGNYNYLYRLLRKSKLKPFERDISTEIYQAGNRPCNGVAGSNCYSPLQSYGFRPTYGVGHQPYRVVVLSFELLHAPATVCGPKKSTNLVKNKCVNFNFNGLTGTGVLTESNKKFLPFQQFGRDIADTTDAVRDPQTLEILDITPCSFGGVSVITPGTNTSNQVAVLYQGVNCTEVPVAIHADQLTPTWRVYSTGSNVFQTRAGCLIGAEYVNNSYECDIPIGAGICASYQTQTKSHQQAQSVASQSIIAYTMSLGAENSVAYSNNSIAIPTNFTISVTTEILPVSMTKTSVDCTMYICGDSTECSNLLLQYGSFCTQLKRALTGIAVEQDKNTQEVFAQVKQIYKTPPIKYFGGFNFSQILPDPSKPSKRSFIEDLLFNKVTLADAGFIKQYGDCLGDIAARDLICAQKFNGLTVLPPLLTDEMIAQYTSALLAGTITSGWTFGAGAALQIPFAMQMAYRFNGIGVTQNVLYENQKLIANQFNSAIGKIQDSLSSTASALGKLQDVVNHNAQALNTLVKQLSSKFGAISSVLNDILSRLDPPEAEVQIDRLITGRLQSLQTYVTQQLIRAAEIRASANLAATKMSECVLGQSKRVDFCGKGYHLMSFPQSAPHGVVFLHVTYVPAQEKNFTTAPAICHDGKAHFPREGVFVSNGTHWFVTQRNFYEPQIITTDNTFVSGNCDVVIGIVNNTVYDPLQPELDSFKEELDKYFKNHTSPDVDLGDISGINASVVNIQKEIDRLNEVAKNLNESLIDLQELGKYEQYIKWPWYIWLGFIAGLIAIVMVTIMLCCMTSCCSCLKGCCSCGSCCKFDEDDSEPVLKGVKLHYT

SEQ ID NO: 324 - protein, 1256 aa, synthetic construct
QCVNLITRTQSYTNSFTRGVYYPDKVFRSSVLHSTQDLFLPFFSNVTWFHAIHVSGTNGTKRFDNPALPFNDGVYFASTEKSNIIRGWIFGTTLDSKTQSLLIVNNATNVVIKVCEFQFCNDPFLDVYQKNNKSWMESEFRVYSSANNCTFEYVSQPFLMDLVGKEGNFKNLREFVFKNIDGYFKIYSKHTPINLERDLPQGFSALEPLVDLPIGINITRFQTLLALHRSYLTPVDSSSGWTAGAAAYYVGYLQPRTFLLKYNENGTITDAVDCALDPLSETKCTLKSFTVEKGIYQTSNFRVQPTESIVRFPNITNLCPFHEVFNATTFASVYAWNRKRISNCVADYSVIYNFAPFFAFKCYGVSPTKLNDLCFTNVYADSFVIRGNEVSQIAPGQTGNIADYNYKLPDDFTGCVIAWNSNKLDSKPSGNYNYLYRLLRKSKLKPFERDISTEIYQAGNRPCNGVAGSNCYSPLQSYGFRPTYGVGHQPYRVVVLSFELLHAPATVCGPKKSTNLVKNKCVNFNFNGLTGTGVLTESNKKFLPFQQFGRDIADTTDAVRDPQTLEILDITPCSFGGVSVITPGTNTSNQVAVLYQGVNCTEVPVAIHADQLTPTWRVYSTGSNVFQTRAGCLIGAEYVNNSYECDIPIGAGICASYQTQTKSHQQAQSVASQSIIAYTMSLGAENSVAYSNNSIAIPTNFTISVTTEILPVSMTKTSVDCTMYICGDSTECSNLLLQYGSFCTQLKRALTGIAVEQDKNTQEVFAQVKQIYKTPPIKYFGGFNFSQILPDPSKPSKRSFIEDLLFNKVTLADAGFIKQYGDCLGDIAARDLICAQKFNGLTVLPPLLTDEMIAQYTSALLAGTITSGWTFGAGAALQIPFAMQMAYRFNGIGVTQNVLYENQKLIANQFNSAIGKIQDSLSSTASALGKLQDVVNHNAQALNTLVKQLSSKFGAISSVLNDILSRLDPPEAEVQIDRLITGRLQSLQTYVTQQLIRAAEIRASANLAATKMSECVLGQSKRVDFCGKGYHLMSFPQSAPHGVVFLHVTYVPAQEKNFTTAPAICHDGKAHFPREGVFVSNGTHWFVTQRNFYEPQIITTDNTFVSGNCDVVIGIVNNTVYDPLQPELDSFKEELDKYFKNHTSPDVDLGDISGINASVVNIQKEIDRLNEVAKNLNESLIDLQELGKYEQYIKWPWYIWLGFIAGLIAIVMVTIMLCCMTSCCSCLKGCCSCGSCCKFDEDDSEPVLKGVKLHYT

SEQ ID NO: 325 - protein, 1269 aa, synthetic construct
MFVFLVLLPLVSSQCVNLITRTQSYTNSFTRGVYYPDKVFRSSVLHSTQDLFLPFFSNVTWFHAIHVSGTNGTKRFDNPALPFNDGVYFASTEKSNIIRGWIFGTTLDSKTQSLLIVNNATNVVIKVCEFQFCNDPFLDVYQKNNKSWMESEFRVYSSANNCTFEYVSQPFLMDLVGKEGNFKNLREFVFKNIDGYFKIYSKHTPINLERDLPQGFSALEPLVDLPIGINITRFQTLLALHRSYLTPVDSSSGWTAGAAAYYVGYLQPRTFLLKYNENGTITDAVDCALDPLSETKCTLKSFTVEKGIYQTSNFRVQPTESIVRFPNITNLCPFHEVFNATTFASVYAWNRKRISNCVADYSVIYNFAPFFAFKCYGVSPTKLNDLCFTNVYADSFVIRGNEVSQIAPGQTGNIADYNYKLPDDFTGCVIAWNSNKLDSKPSGNYNYLYRLLRKSKLKPFERDISTEIYQAGNKPCNGVAGPNCYSPLQSYGFRPTYGVGHQPYRVVVLSFELLHAPATVCGPKKSTNLVKNKCVNFNFNGLTGTGVLTESNKKFLPFQQFGRDIADTTDAVRDPQTLEILDITPCSFGGVSVITPGTNTSNQVAVLYQGVNCTEVPVAIHADQLTPTWRVYSTGSNVFQTRAGCLIGAEYVNNSYECDIPIGAGICASYQTQTKSHRRARSVASQSIIAYTMSLGAENSVAYSNNSIAIPTNFTISVTTEILPVSMTKTSVDCTMYICGDSTECSNLLLQYGSFCTQLKRALTGIAVEQDKNTQEVFAQVKQIYKTPPIKYFGGFNFSQILPDPSKPSKRSFIEDLLFNKVTLADAGFIKQYGDCLGDIAARDLICAQKFNGLTVLPPLLTDEMIAQYTSALLAGTITSGWTFGAGAALQIPFAMQMAYRFNGIGVTQNVLYENQKLIANQFNSAIGKIQDSLSSTASALGKLQDVVNHNAQALNTLVKQLSSKFGAISSVLNDILSRLDKVEAEVQIDRLITGRLQSLQTYVTQQLIRAAEIRASANLAATKMSECVLGQSKRVDFCGKGYHLMSFPQSAPHGVVFLHVTYVPAQEKNFTTAPAICHDGKAHFPREGVFVSNGTHWFVTQRNFYEPQIITTDNTFVSGNCDVVIGIVNNTVYDPLQPELDSFKEELDKYFKNHTSPDVDLGDISGINASVVNIQKEIDRLNEVAKNLNESLIDLQELGKYEQYIKWPWYIWLGFIAGLIAIVMVTIMLCCMTSCCSCLKGCCSCGSCCKFDEDDSEPVLKGVKLHYT

SEQ ID NO: 326 - protein, 1256 aa, synthetic construct
QCVNLITRTQSYTNSFTRGVYYPDKVFRSSVLHSTQDLFLPFFSNVTWFHAIHVSGTNGTKRFDNPALPFNDGVYFASTEKSNIIRGWIFGTTLDSKTQSLLIVNNATNVVIKVCEFQFCNDPFLDVYQKNNKSWMESEFRVYSSANNCTFEYVSQPFLMDLVGKEGNFKNLREFVFKNIDGYFKIYSKHTPINLERDLPQGFSALEPLVDLPIGINITRFQTLLALHRSYLTPVDSSSGWTAGAAAYYVGYLQPRTFLLKYNENGTITDAVDCALDPLSETKCTLKSFTVEKGIYQTSNFRVQPTESIVRFPNITNLCPFHEVFNATTFASVYAWNRKRISNCVADYSVIYNFAPFFAFKCYGVSPTKLNDLCFTNVYADSFVIRGNEVSQIAPGQTGNIADYNYKLPDDFTGCVIAWNSNKLDSKPSGNYNYLYRLLRKSKLKPFERDISTEIYQAGNKPCNGVAGPNCYSPLQSYGFRPTYGVGHQPYRVVVLSFELLHAPATVCGPKKSTNLVKNKCVNFNFNGLTGTGVLTESNKKFLPFQQFGRDIADTTDAVRDPQTLEILDITPCSFGGVSVITPGTNTSNQVAVLYQGVNCTEVPVAIHADQLTPTWRVYSTGSNVFQTRAGCLIGAEYVNNSYECDIPIGAGICASYQTQTKSHRRARSVASQSIIAYTMSLGAENSVAYSNNSIAIPTNFTISVTTEILPVSMTKTSVDCTMYICGDSTECSNLLLQYGSFCTQLKRALTGIAVEQDKNTQEVFAQVKQIYKTPPIKYFGGFNFSQILPDPSKPSKRSFIEDLLFNKVTLADAGFIKQYGDCLGDIAARDLICAQKFNGLTVLPPLLTDEMIAQYTSALLAGTITSGWTFGAGAALQIPFAMQMAYRFNGIGVTQNVLYENQKLIANQFNSAIGKIQDSLSSTASALGKLQDVVNHNAQALNTLVKQLSSKFGAISSVLNDILSRLDKVEAEVQIDRLITGRLQSLQTYVTQQLIRAAEIRASANLAATKMSECVLGQSKRVDFCGKGYHLMSFPQSAPHGVVFLHVTYVPAQEKNFTTAPAICHDGKAHFPREGVFVSNGTHWFVTQRNFYEPQIITTDNTFVSGNCDVVIGIVNNTVYDPLQPELDSFKEELDKYFKNHTSPDVDLGDISGINASVVNIQKEIDRLNEVAKNLNESLIDLQELGKYEQYIKWPWYIWLGFIAGLIAIVMVTIMLCCMTSCCSCLKGCCSCGSCCKFDEDDSEPVLKGVKLHYT

SEQ ID NO: 327 - protein, 1269 aa, synthetic construct
MFVFLVLLPLVSSQCVNLITRTQSYTNSFTRGVYYPDKVFRSSVLHSTQDLFLPFFSNVTWFHAIHVSGTNGTKRFDNPALPFNDGVYFASTEKSNIIRGWIFGTTLDSKTQSLLIVNNATNVVIKVCEFQFCNDPFLDVYQKNNKSWMESEFRVYSSANNCTFEYVSQPFLMDLVGKEGNFKNLREFVFKNIDGYFKIYSKHTPINLERDLPQGFSALEPLVDLPIGINITRFQTLLALHRSYLTPVDSSSGWTAGAAAYYVGYLQPRTFLLKYNENGTITDAVDCALDPLSETKCTLKSFTVEKGIYQTSNFRVQPTESIVRFPNITNLCPFHEVFNATTFASVYAWNRKRISNCVADYSVIYNFAPFFAFKCYGVSPTKLNDLCFTNVYADSFVIRGNEVSQIAPGQTGNIADYNYKLPDDFTGCVIAWNSNKLDSKPSGNYNYLYRLLRKSKLKPFERDISTEIYQAGNKPCNGVAGPNCYSPLQSYGFRPTYGVGHQPYRVVVLSFELLHAPATVCGPKKSTNLVKNKCVNFNFNGLTGTGVLTESNKKFLPFQQFGRDIADTTDAVRDPQTLEILDITPCSFGGVSVITPGTNTSNQVAVLYQGVNCTEVPVAIHADQLTPTWRVYSTGSNVFQTRAGCLIGAEYVNNSYECDIPIGAGICASYQTQTKSHQQAQSVASQSIIAYTMSLGAENSVAYSNNSIAIPTNFTISVTTEILPVSMTKTSVDCTMYICGDSTECSNLLLQYGSFCTQLKRALTGIAVEQDKNTQEVFAQVKQIYKTPPIKYFGGFNFSQILPDPSKPSKRSFIEDLLFNKVTLADAGFIKQYGDCLGDIAARDLICAQKFNGLTVLPPLLTDEMIAQYTSALLAGTITSGWTFGAGAALQIPFAMQMAYRFNGIGVTQNVLYENQKLIANQFNSAIGKIQDSLSSTASALGKLQDVVNHNAQALNTLVKQLSSKFGAISSVLNDILSRLDPPEAEVQIDRLITGRLQSLQTYVTQQLIRAAEIRASANLAATKMSECVLGQSKRVDFCGKGYHLMSFPQSAPHGVVFLHVTYVPAQEKNFTTAPAICHDGKAHFPREGVFVSNGTHWFVTQRNFYEPQIITTDNTFVSGNCDVVIGIVNNTVYDPLQPELDSFKEELDKYFKNHTSPDVDLGDISGINASVVNIQKEIDRLNEVAKNLNESLIDLQELGKYEQYIKWPWYIWLGFIAGLIAIVMVTIMLCCMTSCCSCLKGCCSCGSCCKFDEDDSEPVLKGVKLHYT

SEQ ID NO: 328 - protein, 1256 aa, synthetic construct
QCVNLITRTQSYTNSFTRGVYYPDKVFRSSVLHSTQDLFLPFFSNVTWFHAIHVSGTNGTKRFDNPALPFNDGVYFASTEKSNIIRGWIFGTTLDSKTQSLLIVNNATNVVIKVCEFQFCNDPFLDVYQKNNKSWMESEFRVYSSANNCTFEYVSQPFLMDLVGKEGNFKNLREFVFKNIDGYFKIYSKHTPINLERDLPQGFSALEPLVDLPIGINITRFQTLLALHRSYLTPVDSSSGWTAGAAAYYVGYLQPRTFLLKYNENGTITDAVDCALDPLSETKCTLKSFTVEKGIYQTSNFRVQPTESIVRFPNITNLCPFHEVFNATTFASVYAWNRKRISNCVADYSVIYNFAPFFAFKCYGVSPTKLNDLCFTNVYADSFVIRGNEVSQIAPGQTGNIADYNYKLPDDFTGCVIAWNSNKLDSKPSGNYNYLYRLLRKSKLKPFERDISTEIYQAGNKPCNGVAGPNCYSPLQSYGFRPTYGVGHQPYRVVVLSFELLHAPATVCGPKKSTNLVKNKCVNFNFNGLTGTGVLTESNKKFLPFQQFGRDIADTTDAVRDPQTLEILDITPCSFGGVSVITPGTNTSNQVAVLYQGVNCTEVPVAIHADQLTPTWRVYSTGSNVFQTRAGCLIGAEYVNNSYECDIPIGAGICASYQTQTKSHQQAQSVASQSIIAYTMSLGAENSVAYSNNSIAIPTNFTISVTTEILPVSMTKTSVDCTMYICGDSTECSNLLLQYGSFCTQLKRALTGIAVEQDKNTQEVFAQVKQIYKTPPIKYFGGFNFSQILPDPSKPSKRSFIEDLLFNKVTLADAGFIKQYGDCLGDIAARDLICAQKFNGLTVLPPLLTDEMIAQYTSALLAGTITSGWTFGAGAALQIPFAMQMAYRFNGIGVTQNVLYENQKLIANQFNSAIGKIQDSLSSTASALGKLQDVVNHNAQALNTLVKQLSSKFGAISSVLNDILSRLDPPEAEVQIDRLITGRLQSLQTYVTQQLIRAAEIRASANLAATKMSECVLGQSKRVDFCGKGYHLMSFPQSAPHGVVFLHVTYVPAQEKNFTTAPAICHDGKAHFPREGVFVSNGTHWFVTQRNFYEPQIITTDNTFVSGNCDVVIGIVNNTVYDPLQPELDSFKEELDKYFKNHTSPDVDLGDISGINASVVNIQKEIDRLNEVAKNLNESLIDLQELGKYEQYIKWPWYIWLGFIAGLIAIVMVTIMLCCMTSCCSCLKGCCSCGSCCKFDEDDSEPVLKGVKLHYT

SEQ ID NO: 329 - protein, 1269 aa, synthetic construct
MFVFLVLLPLVSSQCVMPLFNLITTTQSYTNSFTRGVYYPDKVFRSSVLHLTQDLFLPFFSNVTWFHAISGTNGTKRFDNPVLPFNDGVYFASTEKSNIIRGWIFGTTLDSKTQSLLIVNNATNVFIKVCEFQFCNDPFLDVYHKNNKSWMESESGVYSSANNCTFEYVSQPFLMDLEGKQGNFKNLREFVFKNIDGYFKIYSKHTPIIGRDFPQGFSALEPLVDLPIGINITRFQTLLALNRSYLTPGDSSSGWTAGAADYYVGYLQPRTFLLKYNENGTITDAVDCALDPLSETKCTLKSFTVEKGIYQTSNFRVQPTESIVRFPNVTNLCPFHEVFNATRFASVYAWNRTRISNCVADYSVLYNFAPFFAFKCYGVSPTKLNDLCFTNVYADSFVIKGNEVSQIAPGQTGNIADYNYKLPDDFTGCVIAWNSNKLDSKHSGNYDYWYRSFRKSKLKPFERDISTEIYQAGNKPCKGKGPNCYFPLQSYGFRPTYGVGHQPYRVVVLSFELLHAPATVCGPKKSTNLVKNKCVNFNFNGLTGTGVLTKSNKKFLPFQQFGRDIVDTTDAVRDPQTLEILDITPCSFGGVSVITPGTNTSNQVAVLYQGVNCTEVSVAIHADQLTPTWRVYSTGSNVFQTRAGCLIGAEYVNNSYECDIPIGAGVCASYQTQTKSRQQAQSVASQSIIAYTMSLGAENSVAYSNNSIAIPTNFTISVTTEILPVSMTKTSVDCTMYICGDSTECSNLLLQYGSFCTQLKRALTGIAVEQDKNTQEVFAQVKQIYKTPPIKYFGGFNFSQILPDPSKPSKRSFIEDLLFNKVTLADAGFIKQYGDCLGDIAARDLICAQKFNGLTVLPPLLTDEMIAQYTSALLAGTITSGWTFGAGAALQIPFAMQMAYRFNGIGVTQNVLYENQKLIANQFNSAIGKIQDSLFSTASALGKLQDVVNHNAQALNTLVKQLSSKFGAISSVLNDILSRLDPPEAEVQIDRLITGRLQSLQTYVTQQLIRAAEIRASANLAATKMSECVLGQSKRVDFCGKGYHLMSFPQSAPHGVVFLHVTYVPAQEKNFTTAPAICHDGKAHFPREGVFVSNGTHWFVTQRNFYEPQIITTDNTFVSGNCDVVIGIVNNTVYDPLQLELDSFKEELDKYFKNHTSPDVDLGDISGINASVVNIQKEIDRLNEVAKNLNESLIDLQELGKYEQYIKWPWYIWLGFIAGLIAIVMVTIMLCCMTSCCSCLKGCCSCGSCCKFDEDDSEPVLKGVKLHYT

SEQ ID NO: 330 - protein, 1269 aa, synthetic construct; identical to SEQ ID NO: 295

SEQ ID NO: 331 - protein, 1268 aa, synthetic construct; identical to SEQ ID NO: 213

SEQ ID NO: 332 - protein, 1269 aa, synthetic construct; identical to SEQ ID NO: 311

SEQ ID NO: 333 - protein, 1268 aa, synthetic construct; identical to SEQ ID NO: 211